United States Patent Application Publication US 2026/0275333 A1 - sequence listing, part 4

SEQ ID NO: 3045 - RNA, 64444167 nt, Homo sapiens (residues 6,444,418-8,592,556 of 64,444,167)
  source 1..64444167: mol_type = mRNA
aatttttctttcagtttaaggaaactgatttactaatctatgtcaagaaattatgaactattcaataagccttattgctgtaattttgcctacggtaatacagtagtaaattagacattaatggcaaaagtagactaaatgccccactagaagacactgttaggaatatcaaaactttacaaatgttgaaggacataaatcatggtgaaagtgtaacataaacagttacacggaggtttatagtaatatcctggcactagaaacttggaataataatattagtacaaatatatactaggatgcctttgacagtatagaataattttattttgctgtattcatgtgaatacagtaagtcttcacttaatatcatcaatagattcctgaaactgcaaatttaagcaaaatgctctataatgaaaccaattttttcctcatcaatgttatatgacaaaacaacattgaattaaacgatgtcatttgaaggcctgctgtacgttgttttgcctaatgtaacagttttcaggaacctgttgatgacattaagtgaggatttactgcatatagttataggaacatttctctcattaaaataatccacaattgaattgatatttactagtgctttaatatcagattggaatagcttcaagtcagtgaattctatttccaccatttgaaatcttcttttgggaagtgaatagcaagtctatgtctctagaataggggttcccaagtccctgggctgtggactggtaccagtccgtggcctgttaagaactgggctgcacagcaggatgtgagctgcaggcgagcaagcattactgcctgagctccacctcctttcagatcagggacattagattcttataggagcctgaaccctattgtgaaatgcacacgcgagggatctaggttgcacaccccatatgagactctaactaatgcctgatgatctgaggtggaagagtttcatcctgaaaccatcaccctccacccccatctgtgaaaaaattgtcttctacaaaaccagtccctggtgccgaaaagttggggactgctgctctagaatgtaactgatgtacaactttggttgcattagaatcacccagggaagtttaagaacccagtactcaggtcacattccaggtcagctatatcagcgtctctgggaatgagacccagtcatcagtagttttaaaaattatctcatttcctttagctatggctcacgttggaatcaatatcaatcacattgattccaatgtgaaccaaaagtaaagaaccactgctttctagtttcttgctactagcatatcagatattttttcaaaatattatttgagagatagtttactagggtaaaaaacatcttggagagaggtttaggtgcaggagcagaccctacagttgctacctgtgagatggttaacttaatctttaggtgctttagtttttgtcatctgtaaaataatttggtaaacattttcttagtacctgctataggccaagaatttcatgatctaggtcataagggcattcccaaccccctacaaaatagatgctgttattatgcctataacatgcagcttccgcatagccaggatctttaaaatgcaaacctgtaggctgcacaccagacctacttcagaaactctgggagtagggcccaaagatccgtttttaaacggtactttggatgcttctgttgtatgctcgtgtttaaaaacccactccactacactgtaccatgatagtctctgccctgtagggatgttgtgaggattaaaaagataatccatagaaagtatttagtgctgtgtctaacacacaataagtgatcaatagctgttagctaataatatattattttaggttacctgaattagaactaaatctcctcttgcaaagacacaaccaagtcatctcttcttcagcttcacatgttttaagaaataataataataataataaaaatatgaatgccatagacttagctcacaatctccttcttttctttttcaaacatcaatcataattcactgtgacttgctaccctggctatatctgcagtgttggaattagaaccttgaactttggtgtttttttattattttgatgacagtttggcaaaaatattaaccattttataattcatgccagactatatattactgtctccctcttcctccccaaaaatcgcatgtcacacattaccttgtgtaaataggcatttgagattcttcacttaactttgacagtatgtttgcagtaacattctcttcaattgcctctgtacctgtagggcaaagttcagcatcatcctctctgctgaaataaccaacatggtgctcattaattggtcatgtgagcactaaggataaccaccctcccctcctcaatcaggtaaccctaattattttctcttggtaaaagcacactttgctatgtcactttcattgcgacaaacacagacttgtgctgagggaaatgccttttatgtgggaaccattaaaactgttagatgcagaaattccagcaatttagcttttaatagtaaagctagccaaaatgtgtttgcgtggtttttgttcatcaagaaaaagagaagttacacaaagtcagtgaccacggctataggctcacattctgagccatcattttcctaataagctgagttaaaaaaaaatcccacaacagattttgttttaggtgtgttcagactattctcaaagagctactagaaatctcagggattagagaagaaagagaagtggaccaaaaagatcaaaccagctcctgggtggtcactgaattattgggttactttcttctgataatagattttctactgtctttatgatacatagtttctccatctttgaagttaaagattaattttaattggtattgcacatatctatgataaactagtaaagtatgttcaagaatgctcagtattctccagagggagagaaaatgtttgtagttgttttccattgttatttgtccaagaggcatgggctgtgatgtctatgtggatgatgtctttgcaatgtaattaaatgtcattgcaatgactataatgtctacatggctgagttaggcagagtggatgaacatggagcatttagacccctccacagagatgagaaagatgcagaaaagtgagcttggcagaaaagaaggtatccagacagtcaaagcattgcattctggccaggttctgcaggacctgagatggagattcttatataagtgatttaatgaggaaaaaactctcaggagaaatctgtaaaaaagtaaagaaagcaggacaggtagccaagcaaagatgtgggttcagctaatgtctagtttgagccaatggaaaactctagaacataaatggcatctcacagttttcctgctttggggcaaaagggctaagcatttgttaccttatatgagtcaattattggctgcaggatacccccaagggtggggatcatagcctcccaggcatcctctagagatttttctcctggccaagggcaattctctaaaacgggaccatctgctactcatagcatacaccactcacagaactgggataaaggggatctgggtgggccaccaacagtgtctagtacccatggtgtctggggtatgctgttggtacagagcattgacttctaaagggaaaatggagtccaacaggtctataacataggaggtatccctgaagaaggcaagaccacagaagtaaaaatatcaacttggagcaatgctcaggagccttggtaagagaccagtgaggtcaaatacaaaatggctgtgtgagttgttggaacaggagctcagaataggagataaatctttttcagtagactgtggaaagcaagacatgacaacttattatcagaatattgctctggatgtccagctatggggagagaattaaaggatatatcacgaggataattccgaattatcctgcagggtggatgacctgattctgagctccactgagtggagatactgaatttacttgctacctcctatctttaatgtcatctgagaactgatgcttgttgagtggatgtcagtggtccaactagtgatgaatagagtagaacatgagaataagggaattaagcaggagtccatgggttatatgtacaataaaaaggcaacatattctaattcattatgtatatattagataaatgttttctttggtttattttctaggatcactttctatttttattgatgcccagaaaggctttcttttgtgcctagcccaagatctgtaagtttgccaattcattggtatgattccaagcataagaatgtttagtaatgttactggtgacccaaccaatggtctttacttttctttcttcctagtatgtttgttattgtaaaatcttatagtctttataaccccttattctccctagggatttttaaaaattcagggtatcactaatattacaaccgttatatctcgataaaatttcctctaacttcaggtatttgtggaaaatgtcacacacacaagagattaagaacatctttaacaacaaagggaaaataatagtcaactgtatatataagcatttagattatactcttttgtaataaattatcttagtctgttttctgctgctataacagaataccacatgctgggtaatttatacagaaaagaagtttatttgactcatggttctggaggctgggaattctaagattgaggggtgccattgggtgagggccttcttgcaatgtcgtaacatggcataggccatgacgggttgagagatggtgagagagatgacaagggaaagaggtaaagggggcaaactcctgtgataattaactgactcctctgatcatggcattaattaactcgtgagggcagagccttcataacctgatcacctcttaaaggtctcacctctcaatactgttacgtggtaattaagtttcagtgtgaattttggagaggacattcaaaccatagcaggactctcttacattaatattcagtcttactctggaattgtcatccaggaaagatttgacaatgtcaaatgctagtggtcagttgcaccagtctctcagccgatgtgtaggttcagatcccaactccaccatttattagttgtacgaccgctgtgtttcagcttctctcctgtgtaaagtggtaacgatagtactttccttgtagtgttaacatgtagcttatagggactcaaaaccttaataaagatggactacctcaagtcgtaagtttggtaataatgttcctttactacaaatattaggcagaatttgagtcactggttagttctgagtgggggattaggtataattttcttttttttttcaggtaatatttaaattttttttttaagttctgggatacatgtgcagaatgtgcaggtttgttacataggtatacgtgtgccatggtggtttgctgcatctatcaacccatcatctaggttttaagccccacatgcattaggcatttgtcctaatgctctccctccccttgccccacaccctccaacaggatccagcgtgtgatgttcccctccctgtgtccacatgttctcattgttcaactcccacttatgagtgagaacatgtggtgtttggtttctcttcctatgttagtttgctgagaatgatgacttccagcttcatccatatccctgcaaacgacatgaactcattctttttttatggctacatagtattccatggtgtatatgtgccatatttttctttatccagtctatcattgataggcatttgagttccaagtcttggctattgtgaatagtgctgcaataaacatatgtgtgcatgtgtctttatagtagaatgatttataatcctttgggtatatcccccagtaatgggatggctgggtcaaatggtgtttctggttctagatccttgagtaattgccacactgtcttccacaatggttgaactaatttacactcccaccaagagtgtaaaagtgttcttatttctccatatcctcaccagcatctgttgtttcctgggactaggtataattttcttatcagcaattgtgaagaaacttctgaaagacgtgagcctgtcatgttaagacacacagactatgccatgttgtttgggagaaaattgttgaaagttagtggtaacaatgtttccatgctcatcattctcagggttaagggaggagttattaaaaatctactcaattctgaaataaggctcattctaggtgtaatgcatacgatttgatgaatgtggaagcccaaaaacttggcttccgtgacaacttaaatcagaagaaatgaacttcatttcgtacacggttttcttccatcattactcataaaaaagaatttcaaggttggatgatttcttctatctgttcaccttctatccataatattcccgtcaggtggttagatgcctgtatcttgactacctgcagcaatgaagaacttcagatactttagacagtctggggatgatttaatagctaaagaagtttttattttgaacctagatctgtcttatcatgtcttccataattattatagttatttcctttgtagccagttgaaacaagtctaatctctctgactcctatgacaaccctgtaagtatttgaagatagctttgttccaagacctctctgcatttgactgaaatcactaggttcctcatgttcttcattactcttacggtgactgtacgacggatatgcttctgtttctttacatcttgagacagggtcttactctgttgcccaggctggagtgcaggggtgcagtcatggctcactgcaacatgtgtcttccaggctcaagtgatcctttcacctcagcctcctgaatagctgggactacaggcacataccaccatgcctagctaattgttttattttttacagaggtcgggtaatccctattttgaccaggctgatcttgaactcctgagctcaagtgatcctcctgctttggcctcctaaagtgcttggattacaggaatgagccactgtgcctggcatgtttgttttaaaagaactaaacttcatactcaatgtatgagcaacacggaatgggacagggctcaagcggatgtgacaaccatctctgttttggacatattactttcagtacagtccaagattcaaagactttggcaaccacagaattgactgactctttatgagtttacagaagtctatgatctttcagtctttgtcacctatgctactgttaacatgtgtgtcttaaacttgttttttgggaccagtttcaggactaacattgttaatatgaaattttatcttcttagatttgaccaaatattctaccttactgatgactttttttccttctaaccaatctatttttctactaatattagttggacagtaataattgtgtcatggatcagtatgagttatcagtattagttatcataagctagtacatggatcagactagttatcactagtcttggctacagaagagccaagactaacattatgttgcccatcacttggtaagtcatctactaatttggaaaccatgctgctttataggcattatacatagtgtctttgtgatatatttcacttcagtgtttccatttgaaaccaatataaaagtcacactttttcaaaataagtataagaaaaaaattagacaatattccaaggatatgcttgatatgttgtgtggagagttcagacaacatgtgacctgtgagcctagaagtgggtggtcttttaactcatcacagaagtggtggaatgtgagccagataggtatcgaaggttaactagagttgggttagagggaagaggtgcatgcgtttgggagttaaaacattcaggttgatgaggcagaaatagcagagtaacatcagatgatggtatgcagatgactttccagggacaaaggttgtgtagagaactgtgtggatggtgagttcagaaaggtggatcagtgtgcttgtaggatgctaatattagagtcagagttcttaaaaggagcagctcttctctggtcaagccgttctctagtgcttataagtgaagaagctgaagtctcccgactactagctgtttccagacttactttcattggtttcaattacgctaagtatccatcacaaagatgaattttgtaagcagtcatgactgctagggtactgaaaggaaaatatctgattttcttttatattaagatgctcttaggatttctttagggaggcatgctcatctcattgaatatggtttattctaggttcattctaacagggcccacctagttattggccattctcggggaatacttctttgaagttcatgtgctttaatacgctttaaacctacattcaagcatatggtttattttgagacatgaacttgacattcactttcttgtcctgccttttgtggcctgtgtagcaaaaacatctgctctgacaatggaagaaatcataaagtagtaactcctcattaaagtaccagggcaacaatgtaatccttttgggagtatggctgacttgccatgatctgtgagtttctctggctattgtttcctcactccttcatagtagattctcagccaaaagcaatttcttttggacttgtattttactaatgatatatttaataagggaaagggagaaaaacatagggcatcaataatcacaaatatatacatctggtagaggactgaaaggaaaacagatcacagctggctttgacagttaatattatgaaaatgttcagggtggaatgtctattttaaataagaaacacttgaaagaaatggtcaagattaacaggagcttaaattgaaaccacgttggtttgtaggtaatagaatgctagagacaaacactgcctttaatataaaagcattcctcccccagccccacagctccccagactatccatgtggccctgtttgtgccactggaatttgattgggtttggcttttccaggaaaccaggaggtaagaagaacctatttaaactcctgttaaatggcttattccccctgcccaagcctttgggtaactcagtttattaaaatgttctggagttcatgtctgttaactcagtgctatgccacccatatgcctgccttttggtctgtgctgcagtctaacatctgatttgctcgagtccaggagtaagagtcagtatgcaatgggagaccttgttaagaacccagaatggtgggtatcagttcattgtttggcccacagattgttagctgaagctcagatgcttgctcccatctggcagttggtatttgttgtatcaacacagctataacttacccactgaaacaaagttgctggatctaattctcctaaggtacccaagaacctcaaggccacttacaaatagacatcctgtgcatcattttaagggagctttgacttacagctcttctattcattgacttacagctcttctattctctgtttcacatgtgtttttgttagtcaactcagcaaaaaagaaaaaaaaatcctaggaaacttccagcaagtaagacttgagtatttataggaagaatccattcggcattaccaccatcaaaaattccagggagctgttaggggaagacagatgagcaagaagcaaaagtctgctaaagggctcttaagaggagaacaatgaaaacgccttggtcaatgttaatcctgccagaaaaagatgtagtctccacaaagctgttactcttgagaacagaaattcttatttgcttttcttttgcatattgcccagtgtccaggacatagcgtcttattttccttcctacggttctatccacttgtaatacttcccagcaagtacctagtctattgtcaatatctgtttcatcagtgaagtaaatgaaattgagttcaggtctttattatctgtcatcctcagtctatttcaatagcctcctgacaggattttcctttcagtagcatacacgagtctgtcagaatagtcttcaaatgtttcccttttgtttcactcattctcaaactgttggcattgccaaattgcccacaggataatttcaaaactccgtagtcttacagcatttaagaccatccaaataccagtccaggcaatcctctcaccttatctcctacgaagttccccaatcaaatagtcgtttctggccgaagtgactcttggtctttctgaatgtgaattagccagcagcagtatattgaccaatgtcattccactgcctgtttgttctgtcctacttctgccagcactctctgcccaaggatctcctcctagtttgttgttttttttgttgttgtttggttttttgatacaggtcctcactctgtcacccaggctggagtgcagtggtgcaatcttggctcactgcaacctccatctcctgagctcaagtggtcctcctgcctcagcctcccaagtatctgggacaacaggtgtgtgccacaacgcctggcctcctcctgaccctttagaacctatctggagcttgacgttcttcatgaggccttttctggaatgtccagttagaaccaatgtagaaataagtataagaagaaaattttgtttttttggcagcggggcaagcgtggggacagcctgctagcagtagccccaggcgagaaaactccagtgtcaagccaatcctattttcttaccttttagtaccttgctggactcaagttattgggttggagagtcaccatttgtcacctctgatgtttctctggatccacttgaatgccctaagattattagctgagcctgctctgtgtttgttttcctgctcgtctgtgtgccctggatgttttcctctttgcacatcctttggtcaagccaatcatgacgtgattctgccaaaccttccccactttcaggaaacacagtagaagagtgtaaagtattttccttccctgcttactgaacattcatacctgtggcaggaactagctctaagatgccaggatgaaaaccaagccctgagtagtaggtaatacacaccactcttaccgactctagctgtgaatgctcccattgattaaactttactggggatccttgttcagttgactgtttacaccagtgcttctcaaagagtggtccccagaagaggagcattggattcacctggaacttgttactaatgcaaattcccactgcagatttacagaatcagaaattctgaagggggggctcagcaatcatcctttaataagccccataggtgattctgatgtcaattaaatttggaaaataatgggttacatgaaggccagcagtctccatattaattcctaattaacttcttgttaagtagagtaggcagcactttatatacatgaacacagcttcctacctgagcagtgggagaacatttggtgtaacattccatggacatttggcaacctcacaatgaaggtaacagacaacctaaatgtttaaaatcagcaatgagaaagagccttgtttcaaatataccaccatattctagtaagagtgtagcaagattgctagatataaaagaaaaatcaattaaaaaagaaattagacaatacatttaaaacatgaagtaactaggaccagatctagcaaaagatgtgaaagatctgggtggataaagttacaaaaattaattcagagacattaaacactaaataaagggatatactacattcacaaattggatgacagaataggtaaatgcataaattcttccgagttaaaaattaattgcagttcaatatagaaaaccctaaagatcccaccaaaagaactgtcaggactaataaacaaattcagtagagtgcacactgcaaaatcaatatagaaaaatcagtatcatttctatatgctaatagtgagctatctgaaagataaatcaagaaaataattccacttacaatagctacaaaaattaagatacctaggaataaattgaactaaggaggtgaaagatctctgtactgagaactataaaatattgatgaaagaaactgaagagaataaaaataaatggaaagacatccaattttcatggattggaagaattagtattgctaaattcccacactacccaaagtgatctacagatttaatgtaatccctatcaaaataagaatgacattcttcacagaaatagagtacacaatcctaaaattcatatggaaccacaaaagacccccaatagctaaagaaatcccaaacagaaagaataaagctggaggcatctcactacctgacttcaaaatctactataaagtgataataagctgagcagcctggtattggtataatagcagaaacatattccaatggaacagaatagaaagaccagaaataaattcatgcatctacaatcaattgacttatgacaaaggcaccaagaatgcacattggagaaaagatgatctcttcaatcaatggcgctgggataattggatatccatacaggaagaatgagactaaatcattacctctcaccatattaaaaaattaattcaaaatggattaaagacttaaatgtaaaactaaaaactagaatactactagaagaaatcaggaaaacactttatgacatttaactgggcaatgatttttaaaacaagactttaaaagtacagtcaacaaggcaaaaatagacaaatgagactacattaaactaaaacgtttttgcacagcaaagaaaactattaacagaatgaaaagacaatctatggaatgggagaaaaatttgcaaattataaattatgcatctgaaaagtggttaatatcaaggatatataaggaacttaagtcaaaagcaaaacaacaacaacaacaacataagccccacaagaaaacgcagaaacacaaataaaaacaaaaaacacaagcaaaaaaaaccccaaataaccagattaaaaatgacaaaaaactttaatagacatttttcaaaagaagacatataaatggccaacagatatataaaaaatgctcaaaattatttatcagagaagtgcaaatcaaaaccacagtgagttagaatggataagcctcactccagctagaatggatattatcaacaagacaaaaacaaacaaacaaacaaaaatccccaagtgttgtcaaggatgtgaagaaaagaaaacacacactgttggtgggattgtaaactaatacagccgctgtggaaaacagtgtagaggttcctcaaaaaattaaaaatagatccataaactttaatgctccactgacagcactagacagctcatctagacagaaagttaacaaagaaacaatggacttgaactataccccagaacaaatggatttaacagacatttacagaacattctactcaacaactgcagagtatacattctattcatcagcacatagaacgtttttcaagatagtgcatatgataagccacaaaacaggcctcaataaatttaagaaaattgaaattatatacagtactttctcagaccacagtggaagaaaactagaaatcaactccaaaaggaaccctcaaaaccatgcaaatatgtggaagttaagtaacctgttcctgaatgattgtggggtcagcaatgaaatcaagtaggaaattaaaaatttctttgaactgaactataatattgacacaacctatcaaaacctctgggatccagcaaaggcagtgctaagaggaaagttcgtagattaaacgcctacatcaaaaagtctgaaagagcacaaatagacaatgtaaggtcacacctcaaggaactagagaaacaagaacaattgaaacccaaacccagcagaagaaaagaaatagagatcagagcagaactaaatgaaattggaacaaaatatacaaaagataaatgaaacaaaaagttggttctttgaaacgataaataaaattgataggccattagtgagattaaccaagaaaagaaccaaataagctaaactagaaacgaaacaggaagtattacaacagataacacagaaatacagaagatcattcaaggctactattaacacttttatgcacataaactagataacttagaggagatggacaaaatcctagaaatatacaaccctcctagattaaaccagggagaaatagaaactctgaaccaaccaataacaagcagagagattgaaattgtaataaaaaatattgccaacaaagaaaagtccagggccagatggattcacagctgaatttcacaaaacgttgaaagaagggttggtaccaatcctgttgacactattccacaagagagagaaagagagaatcttccccaatcattctctgaagccagtatcacccttatactaaaatcaggaaaggacataacccaagaagaaaactacagaccaatatccctgatgaacacagatgcaaaaatcctcaacaaaattcatatggaaccaaaaagagccggcatagccaaagcaagactaagcaaaaagaacaaatctggaggtatcacattacctgacttcaaactgtactataaggctatagtcaccaaaacaacatggtactggtataaaaatgtcacatagaccaatggaacagaatagataacctataaataaagccaaatacttaacagccaattgatcttcgacaaagcaaactaaaacataaaatggggaaaggacactctattcaacaaatgggataactggcaagccacatgtagaagaatgaaactggatcctcctctctcaccttatagaaaaatcaactcaggatggatcaaagacttaaatctgatacctgaaaccataaaatttctagaagataacatcagaaaaacccttttagacactagcttaggcaaagacttcatgaccaagaacccaaaagcaaacgcagcaaaaacaaagataaacagatgggacttaattaaactaaaaagcttctgcacagcaaaagaaactatcagcagagttaacagacaaatcacagagtgggagaaaatctttgcagtctatacatctgacaaagcactaatatccagaatctacaatgaactcaaatcagcaagaaaaaaaaaaccaaacaatcccatcaaaaagtgggctaaggacatgaataggaaattatcaaaagaagatatacaaatggccaacaaacatgaaaaaaatgctcaaatcactaatgattagggaaatgcaaatcaaaaccaccatgtgataccacctcactcctgcaagaatgaccataatcaaaaattcaaaaaaataatagatattggtgtggatttggtgaaaatgaaacacttttacactgcaggtgggaaggtaactagtacagctgctatggaaaacagtgcagaaattccttaaggaactaaaagtagatctaccgtttgatccagcaatcccactactgggtatctacccagagtaaaagaagtcattatacaaaaatgatacttgcacacacgtttatagtggcagaatttgcaattgcaaaaatatggagccagccaaaatgcccatcaatcaatgagtggataaagaaactgtggtatatatacaccatggaatactactcagccataaaaaggaatgaaataaagtcatttgcaataacctggatggaattggaaaccactattctaagtgaagtacctcaggaatggaaaaccaaacatcatatgttctcgcttataagtgggagctaacctataaggatgcaaaggcacgagaatgatacaatagtctttggggactcggaggaaagcgtgagaggagggtggggcacacaagactacacattgtgcactgctcaggtgatgggtgcaccaaaatctcagaaattaccactaaagaacttattcatgtaaccaaacaccacctgttcccccaacaattattgaaataaaacaaaatagaactaccatataaaccagcaaccccatgactgggtatatatatgaaaaggaaataaaatctgtatgtcaaagagatacctgcattcccatgtttatcgtagtactatttaccatagccaagataaagaataagcctaagtatccaacaacagatgaatggttaaagaaaatgtggtatatatacaatagaatactattcagccttataaaaagaagaaaatcttgtcatttgcaaaaatgtggatgaacctggaagacattatgctaagtaaaataagccagacacaaaaagacaaatgctgcataatctcactcgtgtggaatctaaaaaaataacgatatcacagaagcagaaagtagaacagtggttaccagagactgggagagggggagaataggaaaaagttggttaataattctgctgtgcaatatagaacaccagaattgattcctcctactttaggttctatattgcacagcagagtgtctatggttaacagtaaaatgttgtatattacaaaatggctaggagagagacttttgtatattcttgccacaaagaaatgataaatggatgaggtgatggatatactaactactctgattgggacattaaacaacatagatgtgtatcaaaacatcaaatcataacccataaatatgtatagtgagtcctcatttaacattgttggtaagtttttgaatattgagactttcagcaaaacaaagcacaggaaaacaaaactcattttaccatagactgatataaacaagaattaagtccccacagcatatagtaagttgtttcatttaaagtcacattttccaagaacctatcgatgatgttaaatgaagacttactgtgcaattaaaatgtattgattaaaaattaaatactttttttttaaaaaggtaaaaatatctgatgtactcttcaggaaaacagcaaaggataaaggctcataaagctatagaaattcaggaagcgtggtttggtttggagataaacaaatacatctgatacagcaaatatatcatggatagaaaacactccaacagacccatacttgcatggatatttaaaatgtggcagaggtggattatggattagtggtgaatccacaaacttttcaataaattgtgctagggaaactggatattcatatggagaaaaagaaataaaatttttccaattattggaaatatttacttccaatttgcaccatccacaaaaaataaactccaggtgggtagattaaatatgcaatgtgaaagacacacagtaatgttttcagatgataacatggaaaatatctttattgctagtggctaaggaagagtttttgaaacaagataaaatgacactaattatattaattagggtaagattgtatagtaacaaatagccaaattttggtggcttacagataaaaaagtttctttctttctttgtaacaatgagggaatggtgtttgggtcaattgttaatgggtataagctgaagacgatgcttctttcttcatcaggtagctttccaaggataacctgggtgtggctgtttcaggccactagacaaataaaaaagagcatcgcagagcccaaatataatagaaattttctaagggccagacttgagaaaggctcatattacttctgttcacatcccactggagagaacttaggcacatggtcttgcctaacggcaaggtggtctgggaaactgtagtgtagctctgcttccatgaataacagagagattttggtggtcagtgaactactccacattaatcataaaatgaatacatatgcctatattaaagtaaccagaaaataaagagagcaaaagactagccagcatgtgagagaagttaaataaataatataaagaacatatctggaatatatgaaaaactgagaaatcaattgaaaaaccagaaaaactaatggaaaagtgggcataagacttgaacaagcacttcagaaaagaaaaaaatccacctcattagtattcaggaagatactattgaatatcacaatgggttacctattttttctttctctccctctttctattgctctatcaattagaataagagtatatatactcaagctgatatatatatatatacatatatataaaacagttttttatatatatatacatatatataaaacagttttttatatatatatacatatatataaaacagttttttatatatatacatatatataaaacagttttttatatatatacatatatataaaacagttttttatatatatatacatatataaaacagttttttatatatatatacatatataaaacagttttttatatatatacatatataaaacagttttttatatatatacatatataaaacagttttttatatatatacatatataaaacagttttttatatatatacatatatataaaacagttttttatatatatacatatataaaagttttttatatatatgtatatatacatatatatgtatatatacatatacatatatatatgtgtatatatatatatatatatatatatactctcagataatatgaagggctgtgaagagtggggcaatgataactcttacactgctagtgggagtgggagttttttatacccacattggaaaacagtttgacatcatgtaatgtagtccaaaatgggcacacattatgatctagccattctcttgctaggtctagatgctaggggagcttttgcacatttactgcaagagataatatgaatgttcacggtaacattgtttgtattgttttggctaccaaagaaaaacatcccacttgtctattaatagtagaatggataaatcaatattggaatactatagaacataaaaatgaataaattctagctacttagagcaatataaataaacctttcaaactaatgaataagataggtaaatcacaagaaatacaacataattcaggagaataaagcctacaaagttttcaaagaaaataagtttaattcaggaattttatacttatttatatccattttgagtataaaaaattggaaacataactttgaacatggaaagacttataatttcctttattattataaggaaccctggccatcaaagaatttggaatacaactctccatgatgtactggactaggggtactcttagttatgcaagcaaaacacctagttctctttttcttaatttcgggttacatgtatgcaaaaattaaaaagtagaaatgcgtagcatattgctagtttttagagtaccacatctcatctcaggataaattacctaaattggtgcttccaactgagaatgatgcaatgttataatggtaggttccttagaatatgaatgatacatatttaacagattaaagattgtctgattgctaatgtttaatttcccagttttggtggtggcagtcttttttacagacctccttcaaaaagactggtaattctagtaatttctgacagctagaaaatcttctagggaattaaatgcccaaacattcaggagctgacatacaaggatgcctatctaaagtgaagaagggtacagccaccaagtcctttagtccttgtttgtctcaagaaaacccttaacttgatccttactcctgagcatgtggtttttcccttggaaattatactgtgcttggatgtttgttatttggggtggtatctgatttgtatgcagggaacaggagcaaagatgctagcctaacttaggggacttaaggaataatggcccaggaagatcagtgtggaataaattttgtactccaaaatagcaaagatctatttagggaaaccgggcttactcaacatatccagggggcatgagcaaatctagaaataggaggtgaaattcagagctgagtggaagccaagagaccgggaacaaagttgagaataaattgaagaaggccccgagtgatgctgcaaacacagtttgtgcctctattgaagaacagctatgcagaatcatgacctttcagcctgtcataaagttaaaggccagagaagacttccaggaaattgatattggtgggatataattatcctgatgggaataggagaaagctgttgcaaaaattgagactcgcaatgatggtgtcttggaatggagagctgagatcctcgatggggagaagtggtttgacttcagctatagtttgaagcaggcgatgacaggatttactgatgggtatgagaaaggagagtccaggagaattccattagctgagacaggaaagattgagggaagaatatttgaagtgtctggtggaaattaggggtttggttttgaatacgttaagtttagcatgtctgaaaaacatctatgtggagatgtttctttcagcaggaggcttaacaaacaacagctgtggtagctgttacttttcatcaccttgacattcagtgacataaatccctgaaagttggaacctgctaacatgtctcagaagacagaatccttacccaccaaaagctgctcacattcaggtttccctttccaaataaactctaatattcattctatttggttcctttttttggctttgcttctcatcctgaattcaaacaagtgactaatcaggaagctcaaagaccctctatctccattgctaattctattggctcattcagtcattaaacatgtttactacgcactgattataagtgtaaaaaacaggtctcaattgcccatataggtgacctcaataataccccttatattggcatgtcctccttctctttctcggtctcccaaactcctcactcccctttggggatgtaggtctcaggctctacttttgtaagcagataatctgtgccattcaagcaacggtcaacaatgaactataatgaactatcaaagccataatggacagtccgcttcacctggacatgtggggatggcattaatggcagccacatagtgtgtgtccttgtcaatcagattattgctcgctttgcgtagagcctccactggcttcacgttgtacccagggttagatccatgacctccctcccaacaattgccactctcccatccactacaatctagcaacacggacctgcctttgctttctgctcctttaatatgccccttgctcccatgtcagggcctctagacttgctgttccctctgcctggaatgctttcccctacatctttgcatagctgattcatgcttatcaaagtcagctaaaatgtcagcattttagagaaatcttctctgatgtcctttactgaaggcagtggccttgtttttcttgtctgttgctgtgtgttcattgctcatcccaatgcctaggtaagtgtatgtcaccagatggcccttgtagcaggtgcatttagagctctgctcacatcctctcagcactcacctctacatgctggaggtgactttgctgacacctgccactctccttggggcttttttgactgaaggtacccactagactcaggaacagggcaagtcagaaatgccaaagagttaatgctggagaagcaactctcaagcatggggggttgtgtataaataccctggcttccttgccccttgggtagagtaactctgaggaatgtattacgcactgtctccaggagttttccagttagattaagctccaggtgcccacagaggtaacttgcctaagaacataatatttattcacttcctttttttttttgctacctcattttcccattctgcccagtgcttcttgggattgcctcccagtgaatcaacgtgcacttggacgctttctcacatccctttgcttctgggaaatctagcctcagacaaccctcaataaatgaaaaaatgtccaagtatttatattcaaatagtacttactgcctggaagtcaccaggagtttgattcatagtgtcatagttttttcccccacattacacattcagtcagtatgctttttaattctggctctcacagggaaagcatacaataacatatgttgggtatgttgtttaacgttcacagcaaagacttactatgtgctttttggtttgaggatttttgagtaagtggtggagacatttttgatgtcaccccaagttctgctgagcagaagtgataagaatgtctctctatgaagctccaccaatagaatgcattgagtcagaaaatttcataaccttccataaacaaagaacaaggtcctaagtgaagggaaaacaggaagcgatatgaggaggaatttgtttaccatgatttcaacaacactggaatttatttttatcaaaatgaaaccatgggtaagtcaacaaggctgggcaaagcccagagactgtgaggtcctagattcccaaccgggacactatgaactcaaggaattcaaatacattttgatttttctagaaattgctcaatgtttctcacatgagtctcggtttcttttacttttctttttgaatttcaaatattttctttttgaaaacataacatatcaaagagagttttcaagaacccagatttaaactttaaagccaaatttctgtaaggtcacccaacattttatcttacaatgaccaacacctggagtataaatgatccccatcattgtgcctccttttgttagccttgttagagaaggcagcagagttctgaactagtttcttgtttccttaatgtttagacaggggacaaagccctctgtatctatagaggccagtggtctggagaccatggacaacaagacattgtatctttgtgtcttgtgggaagcagggagggtggagcagtgttgctgactttttaagacaagctaaaaacctggattttcctataaaatttccccaatttgaatgttttaaaatcatcgtgtaggctgggcatggtggttcacacctgtagtcccagtactttgagaggccgaggcagaagggtgccttgagcccaagagttcaaaaccagcctgggcaacatagtgagacctcatctctacaaaaaatgaacaatttagctgggtgtggtggcatgcacctgtagtcctagctactcaggaagctggggggaggatcgccttaagcacaggaggttgaggctgcagaaagccaatatcatgccactgtattccagcctgtgcaacagagtaagactctatctcgaaataataaaataaaataaaataaaatcactgtgtaaaaaaaaagtctccattttaaagcttgattttacacttctatttgaagaacttgaggctactttggcactataataaatgaaagggttcccctgtaatggaagcaccaccagagatcctgtgctgagatttattgccttgctatttaaagagtggtctctggccagctgtatcagtatcagctgggaactcattagtgacacagactctcaggcctatgcagatccactgaatcggaccctgctgtctaacaagctccccagaggattcatgtgcacgttaaaatttgagaaacattgattgagtttgcctcttcaggaaaaaagaaaaaaatcagactctaaatgcagaagctacaatttatgtctcacatggagagagaggaaaaagaatactatggaagtcatagacacttataattagtaatagctagctaaatatttaaaaagtggcttattaataaggagttgcatattctctgtttggatatccagttggttgtctatattcatggcttctggcatccatggattcaaggaaccactgactgaaaatatttggaaaataaaaagtatttgtgctgaacatgtacagactttttttggttattattccctaaacaatatagtatgacaattatttatataggatttgcattgtattatgtattgtaagtatctagaaattatttaaagtagggaggatgtgtgtaggttatatgcaaataatgttgcattttatataagggatttgagcatatgcaggttttgttatctgcagtgggtctagagtcaatgcccctacaggtagtgaggaatgactatatttagtcaatttgttgaggcatgcaattgattagggcagcctctctcaatattttcagccaaagtctgtatttccagtaataacaggatttttatatttgggttatgctgtcaattacatgtattaagaatctattttgtgcatgctactgttctgagcactgggcccagggatgaataaggcacagcttctatctcaaagcacttagtatcttgatgacaagacatgcccagagcagccacagaagcataaatagcatggggaatgcagtactaggaggctgagttggccaagtgcccaataattgatctttgtcatgatcattcaacacaatattgtacttactttttttgatttgaatatttatttgcttaatatctgtctacaattccacactgaaagcattatgcctgcaaggaccaatattaattgaatgatttgcccattgcttacttccatatttacatatagctctctacacagggaaggggaatgtaaaagaaaaattataggcaactttgcatgacatgcttgagtcatttcctgttaatgttttctttctctataaataatatatgcaaataaaactaactgaattattttacagaacccctgcacttctgaggttttacacactactcctcacttcctccaattcctctgtcccttaaccccagccctaggcaacttcgaatctatttcctgaccctagggatgtgccgattctaaacatttaaaataaatggaatgataaaatatgtggttccttgcgactggctcttttcacttagcacaatgttttggaagctcactaaattttgttttcattctgcatttctttgaaatagaaaaaaagaaacttaggctaaggaagatattaaaatattacagaagtacaagtgactcccaaagcttgagctacatcatgcttttgtttataaatgtagaaacacatgtgttccttctgtttctctttcagctgtcttgaaccaagtttttattgggtgtttggtggggcttatgtgagaactggatggccctaggaaaaactgagaaatgtatgtttattttccatgcctcttctttccaatttttatatcctcctcttctccttagatatccaatattctaatggtacatctttaccctacagtattacattctgaaaatgaatggcaaagttagttaaacctgttaaataacattttaattcccatagcgggcttctattttcccacctaaaggagagactaatggtaaacatttcaggaagacggggaaatgggcaactatttttggttaagaacaattttctagacatttgttgagagcttgtcaggtgttaggcaagtgccgtatcaaagaggtaaagtaatgcccaagacacacagctattaagtggtgaaagcagaatttgaacggttcttcctgattacagaacctcagtgcttaattattgtggtatacagcctcctcgatgcttgttagtcaccctataaattcctcagccaacgaccattccatcttgcccttcctaaagcaaacacagtatgtatcatttgatatttattctgtcttttggcattctttctagagaggatgttatcaattctgtaagttgtagtttctgttggtcatttaaaaatatgaaagtcaacattttgtttgtaaattcccttttctacttactagaaaactctagatctgagttttcaagatgtagtaacctgtatctgtattatattgcatggagaacataactactatcactagagagggttcagttctttaatttgatgaaaatgtcaggctaaagtggaatgagaacttattcaacttaacaagcatccattgactttctaatcaagaaatgctaaagggagttcttcaacttgaaatgtaaacaggaacatgaagcatgagaaagtataaaactcattgctaatggtaaatatatagacaaatgtagaatattctattagtgtaacagtggtgggcaaatcacttttaattctagtatactaattaaaagataaaagtattaaatatagtaatgttaagagatacacaatacaagtagatgtaaattgtgccatcaataacgaagtgtaaagagggcataataagaagtgtagagttggatgtgattgaacttaagttgttatcagcttaaaataaactcaacagggaagacaacggcatgggaaacctttcagtgtctcgctaagtgggtgctagaaaggacttatgggattttagcttgtgctgggtgatcttaggaagggtttaaggaaggagagctttgcttttaagtagaggctgttgggaagcaattttatgatttggtacagagatagttctatgattgggtatcttcatgatcctatttagaaggcaaaagaaatgatatgaggctaacactgttaactggtgaagaatcagcagacattcgtattagccaggatataggagtatttagtcattatgctggcttggacagtatttatgcttttatctgtgcttacatgtgtttatggagtggtcttgtttttttcttgatccatcatggtcacagagtggatttatctgatcttggtgttctgggaaattttgtatgtgtgacaggacagaataatgacatagctggggacacaaggccagttcctcaacaccaaggctggctggcaggggctttttctctttctcaccatgcacttagttttgcaatgtcaagagttgaggagaactgagttttattttagtccttcaatttatttgctactagctgtttaacttgagaaaactcacacagtatcagagctttagtttccttatacccataagctttagcttcctgataatatgtttccttaaatgggaataataaaaaccaccttgatggtttattgaaaggataaaagaaaatgtaggaaaatctcccagctcttcacctttcagaaaatattccaatttgataaatgattgagggaagattgtctccatttttgtactattaagatgtcattcaatgaaattgcgtatttattgaggacttctgacatagcaatctgggtgtcacgtggccgtgcgatagttacagtccccaaggtggccttagccatgagagtgtatcatgggttcatactgtgcgttcttctcatatgggagtctggggcctacctacttcataggaagtgtgcctcaaaagtctcatttctcagatttctcccttcagttctgtactgcccatctccaccacctaaaggtataaatctatgggttgtcgtctttgtaccttacatgtcggttctgacatttggatgcatattagaatcaactggagggttttaagaaacactgatgtctagattccacccccagggactctaactcactgattttggctgagggtagttagtcattgagattttaaagagtttttcagataattctaacaggcagcagagtttgacagccattgctataaacagtgtttctcaaactttaatgtacttatgagtcatttagggaatcttgttaaaatgcagattttttattaaatttaaaatgcaaaataaaaattcagattcgtaatacatttaaaagttaaaatgcaggcctaggagtctgcatttctggccaactcccagatgatgtcagtgctgctggtccaaggaccacactttgagtaataaggctagatacatctgttctcacttagccttgtagaacagtctataaaatttgtaatggtgtgtcaggtgggatcttttaatggaataagctagagggaaggagggaggaatatagtcatatggacttgcacttccactgtcaaaagaacacattcaacagttggaatttgctatatgtatgttgaggatttgttactataggtgacaagactgtgtgtctgtacctatgaagatcaaattcttatattcctcgttgtaataagcctcctaaaacaacttcagtttcaaaaacagaaaatatagtggggagggagatggacaagataagtttttatattacgtcctatgtttcacatttctacacttcaacctaactatgctgtaaaaatccagagcttgacatcctattccctgctaagctcacctaacggggttttaaccagcaaaaggatgccctcactacctggatagacatgcaaaggaagcactagtgctgtgtggtgtctcctgctccctttgtagagtctttgtgaaagaagtgtggggtaagagctttgtaatatttaggtgctgtctgtaagaaaggacttgttttactttttaatggaacttggaaggaaatatagagttgtaggtggctggatccatttctaggctttgccagtccccattcttacaaaaaagcattgacccatgatgaagagccttaaggcacttacttggagatgcacatgatgatactagctgtgcctgggtcatcttaaggccgactgcaccttcctccagcttaaagaatttataagatgcttctttgggcatgcctaggaaaagcacaggccttgattgaccaggttaaatggaggggcctaagcattacagataattatggaaggagctttaaggaaaataagcttagttggtgataaaacaatgataaatagagactactagctataagacgatctgtctcttatgactgagagttctaggaggaccaggtaaattcagacttgatacggtgaaagggattggatttggttttcctaatagattctggaaataaaattagtgacttggtcttttttactatctcctcatcttagttcctctccagaaagaaataggtgggacagagatgttaaagaagaagaaactgtgctacagagaaggtggaaactaagacataagtggagattagaacttggctgtttggccccagggcttttctcactagactatgatgtagtatttcaagacagcatgagtaatgggcaatgaacatgacaaacttatgttgtgcaaggagtaacatttgagaagcttaggttccagctgggcatggctttactgcctgctaattttccctagctaaaagcacagcaatttgtaatagttgaatcagccctctaatctgagtcaaacatcagttgctttctttgtatatctgctccctaggatcacaaatgctagctttcatatggatttcaagctgggtgaaatgactttttttgcttgtaaagaagaaatgatgatggaggtctcatcaggaagtgatgcagaagactgggacaggtgagtaagcaccactggcagagttaattctggctgccatgcaactccgtagtaagtgtcagtagcaaagctgaagtcaaacattgtttactcctctgctaaggctctgcaaatcggtaaagatacccaaatgcacattccctgcatggtcatcagaaacatatattttttattgacaaggcttagcagatcttagccattgactgaagtgtaatttagatggatgagctattctgctgaagagtgctactagtcttctctaagcagtagtgcaaaactgcagggactaggaaagggctagatccgtgcaaagaaggaaggaaacacctgaaggctcgtgatgcaaaaagtaattactatgcttaacagggagtatcaccccgcttatttacagtcagggtaattgaaatttcatgtttggcatttcccaagatttcacagtgcagaatcaatctaccaaaagctttcatgtataccatatcaattaatcagtcggtatcagcttggtacctaatatacactcaatggttcagtcagacggactatatggacacatactgaaatcgctatgaaaatgaaaattaaaactttggtcctttaaaaataatacaaaatgcttttttcaggacccaaaataaaataagtaaaaaccaaagaaaatgttctaaggagttaaaatggaatggcaaggcctaattcaataatcattaatcccagtgagttttaggcatctttagaatcagaatatggttttcaagagaaatattagaaggaaggctaatatttgaaaagtgagatgattgaagtagccctggcagaggcagggatgggactatatcctagcatcttctccccttcatcttcaccttcttctcctatgtactctgtttcctttcgtgcatatagttcagcaccataaggacctcttgattctgtgtatgacttgcaaagcagtttgggaatgtctattttggcttgattcttccatttaacaaattggtaaactgagacacagactttgtttaaaatgacaggacaagttaacaatagaaccaagaacagagctcaggtctctaacgcccagccctgagagtccacgccccacgccaggtgacttcccctgaaaaaatagaccaaggaataagaagctatattcctggctgggcgcagtggctcacgcctgtattcccagcactttgggaggccaaggtgggtggatcacctgaggtcaggagttcaagactggcctggccaatgtggtgaaatctcgtctctactaaaaatataaaaattagccaggcttagtgctgagtgcctgtaatcccagttacttgggaagctgaggcaggagaatcacttgaacccaggaggcggaggttgcagtgagccgagattgcaccattgcactccagcctgggcaacaagagtaaaactctgtctcaaaaaaaaaaaaaaaaaaagggaataactcttaaggactaaccaaatccttaagttcactttgtgtatggctctacattgatttcgccttgttagatgtctatctgattcaaggactgcgcttgatcatgtacctaatacttctcctcactcggaagttgatagagtacatgattgttctttgatgttgtgatttaacattttcttcctctgtcatctgactgtccaaagtctccattttagattgtaactcttggatggctggcagagtgtctagccgtctagcagtttctctttgtctcatatacattttggagtcagggtgctttttgagcatgatggtaatgattctaacctgacatgccatgcactgggtctgactcatgaagacacaggagctgggctgtaacatttcaccaggttttgtgatgtggggtaaaggaaagaagggatgggaggatgactactggaatgcaacttttactcctctcctacctcatcttgttgatgtcacagcctggaaaatgctgtgccttgcattatttttgaacatataatttgtatgcctttcatgtgtatattgatgaaaaaaagtttgcgctccatccttgcactggaggttttttgctatggcccactggtgtttagctgggaaatgaagtatacaaagaacctaatggatttgggcaattccttttataggagacataaaaacaaggtgagtatatctgggcagtaaatcctaaagtttcatttagccccctgccacccacttaaatcaattcctctatccaaacaggcataatttcctattattttagcctttatcttctcatagtctttttcatacccattgccaatatcctgattcttactcaacgcagtaagtctcataactggtttccccatgtttaatattttgaatctaatctatttttcaatttgttatttgaatattgttataaatacaaattgaattccaagtatgaataaacagagaatataataaagaatgatctctaattagagattctgaattattataatctaagcccctaaagtaaaccatagatttaaaatgatttttatagtactgatattttctctattttgttatgtgtaaatgtaataaaaatttgtattgaaaataataacccaggttcttatgaagaacacatgatggtgaagaaaggacccaacaatgatgtcattttttttttaacattatcaacactttgtggccgttttaaagccatgtttgcaagtaagtaagtgtatgccccatggactccattcttttccctaaagagcctgtggactgggtgagaacctctcatgccatggggaagaagccttctttcatttctctgtcatgcaggaatgaaagatgtgagccttggacttacaaatgaggctgctctgtgtgtggtggggggatgggtggttctcagtgattctttcatttttcatcaggtcctagacctcagtcttcacctccggccccaggccctttgttcccctcacctcagtctcagaaatggtcacattctacagttcttgatgatgagctttctctggagcaatgggggtacccgccaaaccctttcttctccaatgaaacctgtgtgtccaagacaaggaaacctcacacactgctttgtgaactagacaagaagggaataggtgagcagacgctgtagcaaagtgactctgccctggtgtgagatggtgggaaagggggtagtctgagcctgggcttagctttaactctgagggtaagggcctgcaccccaggcatacacagcagtcatctgttctctcttctgtgtatttacttcttggagtatggttggattttaatgaatgtgaaaatctggtgattattaatttgaagaaatcttcggcttagaccagcaaaagagatgtgagatatgagtattacaaatcaaaggtttaatgcttagcctgaagttttctgtgagaactatgagaactttgacatgtacaaagtatccacagacaaagaggggaagaagctaagtccaagtggagctctggaagtttctgtttctagcctctggctggcttctgtagacgataagatgtgagacatcatttctttctcccaatgtaggccttagctatagagttcatttaccttatatttatttttaatttcccactccatgtagcatgcagtgtatacatattctcctcaacttaagatggggttgcatcctgataaactcatcataaattgaaaatgtggtaagtaaaaaatgcatgctgggttcagtggctcacacctgtaatctgacttttggaggctgaggctggaggatttcttgagcccaggaatttgagactgcaatgagctaactttgtgccactgcactccagcctgggcaccagagaaaggctgtctcttaaaaaaataaaaatgaaaaaaaaaattaaaaagaatgcatttgatgtatcatagtctaacctaccttaaacatgctcagaacacttacattagcctatagctgggcaaaataatctagcacacagcctattgtataataaagtgttggacatgttatgtcaggggtccccaagtcctcaggccatggaggtactggtccatggccttttaggaatgggccacaaaacaggaggtgagtggcaggcgagagagtgaagtttcatctgtatttacagaggcttcccatagctcacattactgcctgagtcagccttctgtcagatcagcggctggcaggactgattttcatcgtggcgcaaaccgtattgtgaactgcacatgccagggaactctattagattctcatagaagcacaaaccttattgtgaactgctcatgtgaggaatccaggttgtgcagtccttatgagaatctaatgcctgatgatctgtgactgtctcccctaaaataaatcatagatttaaaatggtggaaccatctggttgcaggaaaacaagaccagggctcccactgattctacattatgatgaattatataattatatcattacatattattttacaatgtaacaataatagaaataaagtgcacaataaatgtaatgtgcttggatcataccccaaactaccccccgccccccccatcacgccccctggttcatggaaaagttgtcttctacaaaacctgtccctggtgtcagaaaggttggggcctgctgtcttatgtaatttattgagtactctgctgaaaatgaaagacagattggttgtatgggcataattgtgaagttgaaaaatcataagtcaaatcatcgtaaggtgggggccgtctgcattctggtagaaataagtaaatgctaattatacttgacttttcagagggggctggcatgagagaaaaagcaaaagagaaagagagacaggagttaatataatacctgttatttgaacaaactaatttatcataagaaatagtaattaaggtaaaatggaacaaagttactcaacttcaaaaaaaacagttttaattacaggtattagttcctaaaattatcctatcagaaaaaaaaacagatatgaaaaatgtgaagtgtttggagttttagagttttcattaattttaagctaatattttaatttgagaatccattgactacctaccacaaaatattaaaagaatatcctactgatacttcctctgattccatttcccttcatcatctaaattcttgtgaattatattttagagtcaaggttttgaacactaatattctcctctttataaattctcattctacttttttttgtttgtttggtttttgttcctatgcgttaacttcctaggctgtaaatttggtttggaatggtacaaatctcatatggaagtttgtaagggtaaaatcaattattctctataaatcactcacaacagtacctggcactgttagccatttttacttttttgaattatattttagagtcaaggttttgaacactaatattctcctctttataaattctcattctacttttttttgtttgtttggtttttgttcctatgtgctaacttcctaggctgtaaatttggtttggaatggtacaaatctcatatggaagtttgtaagggtaaaatcaattattctctataaatcactcacaacagtagctggcactgttagccatttttactttttctggtataaattaccaaactcatatgtaaggcgtggccaagtgctacggtgaaatcatcatcagagccacttcactctcaaattttatatttttgaacttaaatgtctctctttccaagttagcactcatctttctctttcttaataaagtctgtttgaactcactatgatcctttagaaaaccagctatggttccaggccattgtgggtgacctacattcctttgtttaattgagcagatattgatggactcatactctgttgaacatatatgctatctgccccatattttgtaattttctttattatatcaaaagccacagccacctctttttgattgagatgagtgtttctgatttacatttccattcatttatttattcaacaatctcttattaggcatctactatgtacaaaaaatcacttttaaaacactgtaggaactgtaatgaagaataaaattttgtcttgttcttcgaggatcttatgaaaagagtggacaaggtagttttgtaaacaacccactggaatgcaaggcagaatgaaatattgtagctttctcaggaagatagaaactctaagtgttgttgaaactaaaaggagcaatctgggagaagatagaaccaggaattagagagacatttgggaacagacccagatccagtaacggggatcatcagccaggcatattgtaacacattctatggctatactcagtgaagactcaaaatacacatggaatgagctgaacacaaaaggaaggtcattatatggcacttcatgcatgcaaagtatcttctcacatcaatgaatgcagcaattacttctttaagagagttctccacagaactgaggttggcttcagatctccatgtactggaaattcagtatgggcctcaacagggagccaagatgatgtcttgattgtagggtccaagtggaagatcaaccgttaaacctgaaacagcaaattctacctaaaatttaattccaagagttttatagagtactttatattcccatgaagcctccagaatctggagcaagactagctggcagctcaggaggaggcagcctcagctagcaaaagaaagcgtgttggagggttggggcccaggagagtcaatataatgaatctctttgcttgtttccagttccctgtctattagctcctatattcactgtctggcaggtaggttgtacttttggattaagttcttcttttgaaccttatctgaattctgtttgctcaggtttccaaattgctctgggtgacatctgcttgtcaccagtaaaaccaaaaggacagcagggtggattgccttgcacagggcaggcaggtaattgcagctttaattttgtttcgtttttggaaggatccaggtgtccaacctctttatcgcacaaaagaaccttaataaatgtgggagtgttggcagacaagatggcccagtgggcagtctgcccatcagatgtgttggccttctgctattgaaatagtacttcccatggaagcatcacacattaggaattctctgcgggtccaagcaccccaacagcttccaagctaggagcacaattagagacatggagacttctaagcagccaagagatacatttcaccctggaaattcagacctcagcagagaatactcaggccgtgtgaacataaatcattcccctgaaaagtctttcttcttgggaaacaaaattccccagagttggaatctgttggatcgttggtaggtgtgtctctgactttgaagaactgaccactttagaaatcatgcaaatgtcgaataaaagctgggttatctagaatctggccttaactgtcttccctttcaaaactgagctgctttgctgcacacatgcacaaattggagtcagatgtgggaaaagcagggctcaatcaaaagtggaataggccaaggcttggatttagcctgagcagccatcatgggaggctgtctggggaggttccacaagatgaggaaggaagtcagtgagaatcaggggcaactggcagtaggcaaaggctgaggcctcagaaggtgggcagagaccagaaaacggaaaggtgataggtctactgtccacaagggctggagtctgttgtagaactataattcctagaaacactaggggatggtgttggaggcaccaaccaaccctagggctcagagatgggggctagagaaagttccatttactaaaattgtggaataagggtaaccaggtgtatgtcaggtagtgttttttttttttaacaagaaagaactgctaaaaaaaaaaagacatcttaaacttagagtatgcagctagctagatccaaccatgaactcttacagaacagccttgattattggattctggcaagtgggtctatttccagggcactggaaatagattggctcagacctactgtcctgagatgtggcagggtcatgggtaaaagcttagggagacttcactttagtgaagagctttattcgatgaagaatatttgcctcttttcctccctttctgccttctaaaataagcaggcacaagctcctttgataaggtagaaatggtttggaaggaacaggtggacttagctctggataagtcaggggactagctgaaactagatacgggtgtcaaataaaagatttctggaacttgggcttaatcagggcctgcctgtgcagcctcagtgaaaacaaaatagtaggaatccaaagatgaagtagactagaggatcagcaagggctccaaagaaagagtatttggtgaatctatggtcaggctttagtggttcagagaagaatggcacagtatttcaatactcagaggagacagacaaatctggagagatggggacaaagcaaatctagatgtctatgtttctatggaagcaggtctctgaaggcttccctgattctagcaatatccacctattgagtatctagcacacatgagtgcagatgttgggtatcttgtcacattagtgcatcagtttaccagacatggatccactcagtcagcgaggctatggtctaagcttttacccatgaccctgccacatctcaggacagtaggtctgagccgatctatttctagtgccctggaaatagacccacttgccagaatccaagaatcaaggctgtttagtaagagtccatggttggatagtgaggatgggggacagatataattatgtgtacaattcagtttggaagttaaaactagagtacaactggggttttattgtattcttctggcaagctaccagtattctcaggcattccactccatttccttcaatttgatttgattccataccattccactcccctccaccccacttcactccatcccattccatgtgattccattccaatgtagtttttattcatggctagaactgtgcaaatggaatagttcaatgacaaatagacatgctattggctcacaaggagttccataaagtatgtttcatgagggaataatcttgtgaaatgctcttcaaggaagagagctccatcttattctcttatggagaatcacatcattatttaaaaaatgtatccaaactttgtcataaatacattagtttactttttaacttgaattaccctaagatatttggctgaagtcaagtttttgttttgttttgttgtttttttttttatatacctattgatagcctgtcaaattattttaggggatccagtcagattggcacatgtggtggctggttgtgtatttgaaggctggccctcaaatttaaatgtccagacagactgaaaagaggaaatgcttttggtacaagctggatgccactggagttttacggatattgaagtgctggggtggggcttgatcatggaaacaggctttggttccaggactagctcaagaaatgtcattaatgtctgggtgggaaagcacaggagggagcagatgctttttttccctgttgcttggctttaaattttaaggtttaccaactggatagtgtaattgttctcagggttttttttttttttttttaatcacagaacatatgttaaaagacattcacatgagaactcatgtctatggctgtacccaaaggcttatgctaatcccactcaggatgctggctcctatactctgggcagaatctttagtcactgaatgtttgaagacactggagcacagatctggccttaatcttgctgtgtctagattgcgaacatgaagtccagtagctctacaaagcattgctgaagttcctcgtaggaatttggttattttgatgcctagtatattgtcaaattcagcactgagaggccttttctgcatcacaggctccttgcaccccaaacagtgatttctttctttttcattttttttcctatttgtcaaaacaatatgactgggtctaatattccagataaatgtgcagcagtgaggtgacagggaaattgaggcaggtatggacatacaattgtcttgataaaagggcagcagttggagctaatggtagagggaggcatgaaacagaaatgagaacagagcatgaagcctgttttttcagccagaagcagggtctagaagaaatcctgttctcagccaaaagacctggtgtcaggtcatgaagaaccagctgtgaggactgagttttaaattggtttcaagttttctgaaagagagctgaagctgagatcctgaccacagcaccactgaaattaaaacagtggccggtacttggagaaaagtaacagataagcagtaagactggtgatacttaccgcagaactagagccttttttttttttttttttttttttttgagatgaaatcttgctcttttcccccaggctggagtgcaatggtgttatcttggctcactgcaaccttcacctcctgggttcaagcgattctcctgcctcagcctcctcagtagctggaattacaggtacctgccaccaaacctagctaatttttgtatttttagtagagatggggtttcaccatgttggccaggctggtctcaaactcctgacctcaggtgatccacccacctcggcctcccaaagtgctgggattacaggcatgagccaccacgcctggccagaactagagcctcttgtatgcaaaaagccaatggccagaattgggactgggcaatcctggttgaaagctcaactttgagatagattctatggctacagctgagaaacttgcagtagaaggaggatgatgtcatcagtttatactaagctaagtgctcagtggttacctttgcagttgtttagcgttagtaatcaatataatgacacaattagaattacatgagtgtgtttgaagacgtcatctatgaatattcttgattctattgataacataatttaaaaaatattccaggactcccaaggaaaatttaaaaagcatgagcaaatatcaaacagtatcggtttcacagtgtgatgtgatactgttcacgatatttgtcatgttgctagatatactacagcattatgtccattatcccatttctatttcattgagtttttcaaaatttcaattattttctaattccaaaaaaaattaaaaaagtttttcctccatctttttttctctttctcataaacaaaatgcactcacattttcattcttattctactttgcatttttccctccctccctccctttattcctttcttatctttttgtcccccttaaatattgattcttctggaaagggcctctaacaatgttttatttaagccatttggcatttctgcatcacaggattcttgtatccaaagcagtgatgtctttctttttctttttatttttctgttttctttttttaaataaaattgtgtacaatttttttcccttttctatgaggtaggtagcatgggtggtgtttccctacagataaagaaacggaggagtagaggcaagcaaagatgtatctaaagccataggagtggtttctgtaagattcaagattgcaatgcagttgaaaggttctcttctcatagttctctgcagtacttggaagtcaggatgtgtgaaagatttcctatggagcattttcaaagtatcaaaaaccacagagattctctgatgtccggtaaaatttgggtaactgggactttttcttgcacactcaacgtcgagaacctcctccccaaagcatatcttattgtcctcatttattgcagtcgggtaacacattgtcaaattcaccttcttaagcacacagcaccagctttgccacacagataagaatgatcctgggagatagagtttcaaatcagacttgtgggaagcagatgttaactgtcacctgccaagggaacgggaggaccctgacactctttgatatatttggaggtgacaaaaaatgacactttaagtctgtagctcttctaggaaatatatctgaatactaacgcgagatagaggccatcagattgagattatgagtgcccactgtcactccttataaagtagtttaatgagccttgttacatagtatagtaaacatattgaaactacctgaactctaactgtattattttatttcacaatttggagataaagaaggtatgttagagcctggttaatgcctgcagtaacttgagtagtttgtgcacatcacatataattttttgttgagtactttgttcattttgtgagagagatggtatcgagtttctatccatcacacataggcatttaccttgggctagagctacagttcttatatttgattctcagtacagcaggaaagcaaacattcttgcatagattaccatcccctattttttaaggcaaagagcaaactagaaaatgaatctcccaccaaaagtgaggtgacgatgagggattctagaaaccatcttctcaggaaagaggaaggggtcttcaggatttggctgtgtaccagcctcaagagaaacggttaacatgagacatacagtgcttgggtcagggatgatcctcagaagttaagtggctatctcggtttgggtttcttaaaagtagcccttgagacaagaatttgagttcaaatatttatttgggaggtgatgccaggaaggatgagagtagggaagtaagaccggaaagccaataaagcgagcgtttatcagtgagttacaatgctgggcaatggggttcactcctgctagggacctctgaattgttcaacccagggacaaagaagctggaatatttgactcccacttaccccttattgcaccctcaggcagaaaggtgcacatgttgttgcatgtttgagaactgaggaagctccaggtgccctctggggtgggctaaagatatctattatgaccgagatgtcctcagggcttagactctaatcttggatctgcctttatatgctgggcagactgtttagctcagtgcagagttgagggaggtgagaaacccaatttgttcagttatttgtgtactgtggatgatacccattattaataaatgattttggtgttggatggttttgtatatattagtttgtttttttaaagaaaacccttgagcttattcaatactttaaaattggtttgtacgtttggaagagtatagtgtgtgttgtgtgtgtgtctatttgtgtacttgacagtatgcacaaaccttagttactgcaggagaatcagttggacattcagtgcatatatgatatgaaacatcatgcttatggtgcatgtgtgaatgtccttaagaggaaatggcaaatgtcttgattagaaaatggcctttcttctcaatgtgatatgtgtagtatgaaatattttcttgaaatagatctgaggtcaggatagctgctgagtggaaaccatgtgcttatcttggaccctttaaaaaaaccctctttcctattgagtgctctgtgtgttaaaattaggaataggaaagttgaccacacgaaaggcctccctgtgttgtggaaatctgaggcctttggtaagagtcacaaagagtgagagccagtgtggacaactgtgttagagtcaacctctatattcatatgacctgaggtacggcagattcccagcagagcctaagcttgtgaagggcaagtgagcataatgctgaaagtaacagccctattatttagggtgagtaacttaaaaagcctgtgtgtcaaaactgggcagagtttttaaaaaaatcgttgaaatatctgaataaatcagctatctaatccactttttcaaatgacccgtaggaaaaaaaatgaactgattatgtttcactatttatcatcatctttctagtttggctgggtggcagcctgatgatatttaaactgtgttggcataaaggcaactcatagttttcttgccacttgggtacattttcagtgggcttgggggaggttgaactttagtaaatacacagtttcaacagctgtattgtctgagggtattaaaatatgtaggccaggtgtggcggctcatgcctgtaatcccagcaatctgggaggctgaggcaggtggatcacttgagatcaggagttccagcagcctggccaacatggtgaaacctcatctctactaaaaaacaatacaaaaattagccaggcatggcagtgcacacctgtaatcccagctacttgggaggctgaggcagaagaatcacttgaacccaggaggtggagggtgcagtgagcatagatggtgccactgcactccagcctgggtgacagagggagactccatctcaaaaaaaaaaaaaaaaagtgtagagtatcattgtcattttaagcttttctgtttctctatgtctctacatttttctccatatgtataatgtaaccatgtgtacataaaatggacattttaaatatgtatacatactatatcagtcataatctagtcatgaaagcagatactatgccagttattttagcaaagaaaatttaatatatgaaatttgttaagcagatattggaggattaaaatttgttacagaaaaaaataggtattgtaagcagctactacttcttagactatgggaaccaagagaaggacctgactttatgagaaccttagaggagtgaccctgcagggctggatctgaggaggtgcaatgggattcattcttggagcatgggctaaaaataaatacataaaaccacacttttggagttcgggatcaaaagccattgccaggtaaagtagcaagcctagtgggatgcttacaggaatagcaagccaacagaaagaggcaagattttcttcctcttctcatcttgcaggttccctctggcaccccttactggcccagcccaacagagagctggctgcaacacagaaatatggtctgcagggtcccagcctcagcatccaaatcagagtttagaagctgggcttgcagaggaaacacagtggcttaatgaccactgtgcatacaaaattggattgagctgtatgaaattgctgatgcccaacttaagtatttttgttaatctaccaaaaatacctcatacggtttaaacaaatatagacaaatacgtattagattgtatgtaatcaaaatatattttatatgttcacaaactttcacacctcataaacgtgtatatacatacacatataatcaagcatatttaaggtggagggagcccattccacacctaattatgtcaaaggaagctggtgtcattccctgaaggagatggaacatatttttgtatctaattcaacctatcaataaagtgcattcatcttgagaccctatgataatcacactgatatgtttttgtacggttccttttacatctgctgaatgtttttccataatggataaatcattgattcgtcatcctattgccttgaccatgcatgatctgttgagtcttcaaggagtcacagtgcgcaggtcccagaagccagaacttgacttatactgtccttcaatagatctagattagaagaggaaacacagaccatccatgaagttctttaaagatttgaagccccttgaaattgctgctgctacggggctgccatgatgcttcaatacaaagtccctatctcttagaaagccagctgtctgtgtttggttacctgtgtgcattttcggggtgggcactcttagtctaaaagaaaaatatgtttgcactttctttatgggagtgattcagagaccattgcgtaagtcatcgttgaaggcacatggtgtgttcattgcgagccatgggaagactccttgggtacttgtcaatgactattgtgctcctccctagggccaaggtgcaaattcctattttgtttactctttaaatagagtacaagagaagggagagtgaggccccgcaaaacaggacaaagagcggggccgtgactctaaaagatctcagaagtatttgcgtagctgcaacatgcatctcatttcagggaatcccacagacagctttcccaaagtgggcatttcctcttgagcaacccacaagcctttcctggcccctggggcctgcagtcccctctctccctgaaaaaccaatgccacaatttcaaagtgattcaactggcgtccccacaatgccttctaattctgactctttcacaatagcagggagtagaagaaactgacaaatgagctatttttgaaccagaagttggcccaactgtcaggcgtaatagcagtcgggtagcatttgtgggatagcccgctcatgaaagatgactttataattgccttccagatcccagggataagagcgtatgttgaaatcagcataaccctcttaggctttcaaaacgcaacctcaagaggccaagagatgtgttggcagcacgagcacttggctgtttgtatggcgatcatctcccccatttacccaaatatgttctgggcattttgtttacccctcacattgtctgtctgtgcgctttaacagatcaaatggcacctattagtatgttgtggcctctttccagagggactcattaccgcctttactgctcataaaatccttttgtgtttaatcctctcagcactttccttcttttcgtgccatctgtcagtgggcttttgtgccctgtgggtcagtatatcaacacttcacttttcctttcctgaagacaggtcctgtttctgaagtcttttcactggggaaggctgttggaacaactttcacaggacaagtaggcaaactgaaggaaaaaataataaataaatccactgcattagggttagtacagttgaatttatagcctgatgcagggttcttccctggaccagagtttcacatttttatcttggaaacatctgctttctgtgctttgcagtacaaagcaaaggtaaattgtggaaacccattctctgctgggaagatggaatactctaagtgagatgacggtggcttcttacatttgcttcttctattaaatatgtaggtatttgtaggatgtttttaactttggggcaagggccactgcccctgccccaaaataggggcaaaataggtttgcagattttcttgataattctcaaaccctttcattctcccagtgcaattaagttactcgtgtgttttcaatcggagagtttctatagggaagtctggggtaaagttggcattgaatccagtcagcaggcaggatgcgggggatttctgtgaccttgatctgatgaccaggtgagcatgtttctatttgtgcactgcagcattgcttagtttagtgttagaaagaatggggcagggtttatatgtcttgcatttttcaaacttctgtctgaatgtttgaactgtcaacgacattaggaccaacacatattagtagttcagcactgttggaatgtggtcagcagttatggagtctcaaagtccaatctgtgggcctactgcatcacaagtacctggaacgtttcacagaagtgcaatttgcaagactcacttcagagctgctgattcaaaatattgggtctatgtgtttaataagcacttctggttattctaactcacatcaaagtttgaaaattacttttatagagagcgaaacagtaactctaaatgggatcagcaaagataaaatatttcccccttccttggttagaaaaatgtactgtgtattgtttaactatgccaggaaagacattcttgcttatctatgaaaagagttcatgtggaagaatataatgaaaagagttaggctaggcatggtggctcatgcttgtaatcccagtgctttgggaggctgaggctggaggatcgcttgagaccagaaatttgagaccagcatgggcaacctaatgagaccccatcactacaaacaaatgaaaaaatatatattagcaagcactgtggcacatgcctgtgatcctagctacttgggaagatgaggtgggaggatgacttgagctcaggagtttgggactgcagtgaggtctgatagcaccactacactccagcctgggttaaaagagtaagacactgtcttaagaaaaaaaaagaaagaaaagaaaagagaggggaggggagggacctatggaggcttttctccctaaatctcattagtctgaataaaaaagttggccatattctcatttcatgtgttgtttacttttatctccatgcagtttggctcatttggtattttaaacacaataacaactcttaaaagtaacaataaccatctcctctatattgtctagagggctggatcaatgggagtatcaaaataaactgaacattaaccagcaaaccctttttgttttaaccctagctgttaagcatttctccaaagcattaatctagagagtttcattgaggattttgtgatgtctcaaggtcaccttttgaagacaataaaaatcctcatgtaactctaggactcaagttgtagctgaagaaaatgtctgtgtaacttctggagaagactatgttctcccaatttagatgaaagtacagcatgaaatacaatttgataaagacttaatgattaaagagtccaataaattgaggtttcactgtctatggttctaaaccgaaagctaaacattcagtgtctggacaaaggagacagtggcttttatcacaggcatattattctgccaccgaggctgtccttgcatctgttggcacaacaccacagaaagtaaaacaggctcccggaatggagttatttccatcccctcccacatagtattccctctggagcaagcaatttgtctatactcaacttttccctgttgattctctgaatcagacagactttccccaaacccctagagctattagccttgttaatctttgcccttcacaaatgaatcttttgtgctgcctgtgactggacttggattgctgtctttcctttcctttcattctttttaatttttttttctcaaatgaacaataagagcaaacagctcaggatgaaggagggtggtgaggaacgatgaactctggttggtcaatcttgatgacacagtttatgggtttggaggattccgttgtcaagggacacagggcagggttacctcgtaaggaaataatgtggtcatgtgatgaagagctaaggctgagagaaactgcaaggtttctgctgctgaacaatgacaaagttcactggtgttctcaggtgcaagggagagaataggccctcattgtaaggcagcatcagccctgcctttgtttctgtttcccttactgcggcattaacgctatcttgtcagtttgtaggcaagttgacatggtatataacactgatggatattgagacagtgcatcagaatggcttgtctttgttgatatgtgtctttgtacactcctagactaggtctataagtaactgaaagctttaccatacacaaagtctcatgaggaagcttaacccttcgtcaactagttctatctatttgtcttaatatcatggtatggtgaaacctaataaggcttgacaaattaaacttggcaagctatgaacactggccttttaaatatttgtttttttccctaattctaggtgaaattttcttttctgtttttttaaaggtgttattaatatacctagtgcacctatttatagtctatagcttgatgaatttttataatacatgcacccatgtaaccatcatccagattaagatatggaccatttctagcagctgaaagactccctgctgccccttctctgtcaatacctacccccaagaaacactattttaatttctattcccactgataaattttgcctgttcttgaaattcacataaatggaataatacagaatttattcctttgggtctggcttctttcactcaaagttatgtctatgagatccatccatgttgttccattctttttcatggttgtgtaatattttgtcgtgtgactatactacagtttatccattctactgttgacgagcatcagattgtttccagtttgcatccccagtgaaaatttttatacaagtcttttgtgtatatatactatcatttctggtgaatatgcccaagactttcagaagcatatatgctgtatggtgggcagatatgtttagctttagtagatactgcttaacagtttgatagtatttttaaaaagttgttaatgtaaatttaatccagatataagaagtaatagatttaaaacgtttagattacatacattatttgactagaagtaaacacctcattgggttatttattttccagcaatctcagaaataatggttagcaaaattagatgatgattgaatgcccttcttcataaatagttgtccacttgattgaaagaatgataaccagaaaggagataaaagttgtttatgaatcaaaatcagcagcacatttttcagcttagctatcttaatgaattttaagctgtgggtaaagttatgagatattactacttcctgaaactgcaagtggaaacccttctaaggttcaaacaactctacatctttcaaggtaaataaaatgaaagcagggcagatttatttggggtgagtgagactttggaaacataaacttttttttttccagcttggaaacaattatgtttctgcgaaactcacagaccctgcttccaaataggaacacaaaacttgatactggattaccaatatcaaagaaaggggaaaggtgctgcttttccattttgggatacaatttcatgttcattgtcctatggaataaatcttaacttctcttataaatgaaacattcagtttcaccagggtgagcttctacaaatccatgaagtcaatacaatattgactatcggctcaatgtgaaagcctcgactgtttatctctttttatgttagagactatgggaaatacagaaggagtaaggatggattctgccttgaggagttctaagtttagcctggaggaagaaagaaactcatgaaattgttatggagttgggctcaactgttccgtgctgatgacagggaaaggggagatcaacatgggctggaggagtcaagtaggcttgtggaagaggtcagggttaaggttaaattaagtttagcctaaagttacctccttacatattttaagtttgggttaaagtttcctgtgtatatagtgaatggtaacctaagcggatgtgttacctactcttgtacctattgtaacctactcttgtaccaatcactaagtgtcagcaaatcacatgcagccaactgctcaaactgtatccaaataaggcaaacacagagctgtaaccaattcagccatttctgtaccttctattttctgtacatcactttcctttttctgtccacaaatcctctccgaccgtgcaacagcatcagagcaaatctgagcctattctgattagggggtgtctaattcgtaaattgttctttgcttaatcaaactctgttaaatttaattatgcatttaacttaaaacttctgaagtttttcttttaacgaaatatttggggtaatctacatgaagagagagaataagaaatctatttggaagaggcttgtggagaaagagagggtagaataatctttgaaaaaagtgtaggagaggacatttgggaacatttcaaagaaaggataattttcccacaaatcaaccagctgtgaatgtgtctttttcacaggcaagtttcaggtggtttgttttaaagtggggctgctttagaacagtaagaatagtgcagtgtttcacaagttctattattgtacacaggcttggaaacacagactcccaggccacaccccaagatgatgtagtatcagtcaactgttgctgcataagaagccagcccaaaactcgatgacatacaccaaacctttattcacacattcaaggttatgaaggtttggctcagatgtgtttcatgagtgttcattctggaccccagaacaaagaggcagcagctaccagggtcatagtctactcatgaaagaagttggaagcttccacagggtattcctctgaaggtatatactataagctctacttacattccattggtaaaacaaattgtatggccaaccttgacacccatggcacagggaaataaacgctgcctttagtaagaagaatggctaagtcacatgggaaaaggtatggatacagagaagggtgaaaaactggaaacaataattcaaaggaccacatttgttaaacctttaacacattatcacacaagctgagaaaacccctaaggagttggccctattattactttaatttacagataatgaaatcatggcttagaaaggccaggaaagttatccaaggtaattctgttaataagtgaccatgataaagctctaaatgtatttaaaccttaatataaccccagaagcacaaaatatttactcaagtctctgtaagaggctttgaatagtattacaaggcatgttacctgagccacacccttaggatccccttgtccacctgcacctgaaatcttcattcctccgggtggctgttcccaacctctcttgtctgtgtttccagatatacacacaaaacaaattccatcagcacttccttttctatctcagaaagaatcttggccaaacctggcctcctacccatttccttctccattagggacatcaattaatatcataaattcattggcatttcttaaaataattgaaaatagcaaaagtgtaactagcattgcctcattacaaattgcttggtcagtcattaagaaggtgcatgttttgtgactcctacaaccttttgcttcttaccaaaaatacctgcttttcattttccaacttttacaggattctgaaagcaagttggactcactgaagtgctgataggttgaccttcactcccctcacttctgaccttcacttcgtgctgtttcttcccctctgcctttttctcctatctcacccccaacttctacttctagtgtgaatcaagtctgcaacgtgactacctgtattctaaattttcttgaatatttaaacatcctttgtgcagccatcagggcccaaaccaagagatttcatcaccactcctcacctacatattctcaatccccagatcactaactcactgaaccaagatgagttgggatatctccaaaggcattgttatgtttgtttgtttggtatcttatggagatgcttaacattgtacattgatgtagattggatgggcctcagagttcaagagaatagtgatgattgtggactagtttagaaactgcctgatgatatttcctgacacagggctcattgaggagggcatctcagcagataatgctcagcagtgccttggcctgtggattaatgggtcaacctagaaagtagcacttcagagtgtttgaaggaccacttggcctttctttgccctctgtgaggtgctcctggatgtgggcagaggcacctgatttttctcaagggcctgttctcttccaccctctgacttccactcccatcaatattacccatttcagttttggttaactttaatatttttctatttgtggatcatgaaataatagaacatttgattcaccaaccattattagtatagtaacaatggaaagtgtaaaactaatgaaatgttttagaacttaatcagaggcaagaatgaatgggggacatgacatgtagagttcacctagattctagtttttgtttacaaataacctttctgtaacattcaaaaacttatttattaattttaatttaaaaagccttttaattaaaataaagtctcatttagtaaaagttcacttacattatatgtatagtaattagacacttctctaacttcataaatgtaatggacctttgtctaacacatagtttctcagttgatatttccttctttttatattctaataaagcagcaaagtatctgtagccacagctgcagttatgtctgtgtctttattttaaaatggatatacttccccatatattcctgtaatagaaactcttcttccttaaacagttaatttttatagatgaattgattagcttatcttgggggaattctttagccgtcagttggaagatgagctaggcttggcttttggaatacttaaatgttgttccaacttatttcagacagcgagaagacctaaacaattttcccaaagcctaaattcacaggaatcacaactttgcatttgtttcaaaagaagacatgtaacttttccctacactaagcttagagaaatgtggcttcttccttatgtttactttgtcactcaaaataacaacaacaaaaagagaactttggagatctttgaaatttgtgtaacatggaaatcttcaagttgctcaagttctacaaattttgagagtcattcgcagtggaagtaagtaggcaatcgttagcacatctgtaaaatggtatccacagttttctttgaatcattgttgatttgctgtgccccagatctgcatggtaataagatattcacatacttttaagtagtttaaaatgttatacctattattcattgaaaaatcgagtatcaatctaagtgaactttccccagctctgtcatttccaggaatagttactactctgagaacagaagattctctgccattgttttatgaaaattcctttcacctaaaaattcgtggtcttctcatagtctaggcttcttcaatcagttctggtctcctgcctcagcagtgaccaggtagagaagccggccaagggtgggaaagggcaaaaaggaagatgctggagccaatcagctcctgtttcagtggctggcattgcctgtaaatttttttttttaatcaagctttctatgttttcatgacgatggcaggaatcaggccattagagttgatggaggggacttgggacaatcacacactctgcacttctctccacttctttctggattaggaaaagtttcagctccattttaagaagaagtgtgtctgttctgtagtgagatccaaaggcagctctgaaaatcccagattcaaaatatcatccccttccccatctttcagaagactttactggctctttaatccttcaggaattttatgctcttctttaatcaattcaaggaaagatttctgaacttttttagttgccaatgagatgcaagtaaaagccagaatggacaaaatgtaaaaaagagtgacaacatcaagtgctgccaatgctgtgaagcaactggaacgtttatatgttgctagtaccaatgccttgttttcctagttactttttcatttacatgtgtgtatgtacctactttttaatttgatgattcggaataaaataactccatttttttgtcttattcctttgctacatctcttcccacccaattatatttttgactcagtaagtaaaaaacaaaatatacacactgcaaaatgatgaaagtagattcagtttgtgtttggcataagagagggaaaaatgacttccctcaaacctcctaggttctttggctgagctatgaattacattgacatgaaacagcttaaaatgagaaaaaccattttaattacatatgtacccacatatgcgtgcaagttccacaaaaatacgatattcacaaaaggatataattgtgatctgagaaaccaaaatagatgctcctttatcaattaagacgagccctaagattaagaaaacaaaagttacctacaggtggagggttccaggctcagctagcaaggcaggtttctaagttcctacaacatataagaaaaaccacacccttgctaaactccctaaccatagaagctatcaggctgatttacaacccagaccactacaactctgtttgggtacaggaccatccttacaaacattcttttataatgggctgtttcagacctcaagccagttttatctacttatagagggtgtgcacagactgtctttctatcctgtaattcaccttttgacataaaaccaaattctaccttattttaatgctaaaaccctgccctaaagtgaacatggactgtatggttatgtatatgtttacccattgcacttgtactcagcaaccctcataaatatgtatagcttttcccccaaacatgctgaatatgcatgatactagccctctgaggcataaaatccaacctgtttttcccctcttcaaagagagacagagtaccttctatccatgctggaaactttctctttccacttgcaaattgatataatcaataaagctctcctttctattactccatcctggtggtcttttggatgacagattgaagctcagagagcagcatctttagctacagaaagcaacaagggcctggagcttctgaggagtggtggagacaaattatggaaggggaggaggaggaggaggaaatgtatggtaaatgaagattgtcttgttatgtagacaaaagcgtctcagatggtaaaagtcatctcagagcagctgtcttcctgatacagatactcttactaataaaagtttccttacagatgtaaatttcctttacaaaggaacagcttttcagtgctacttctgtgtctgcagtttcttaaagtaaccagcttgaaataatcaatatactaaacagctatattatatggtggcacattctagtctcctgcagtcatgttttggggtggcatgtcctgaaccccaacactaatatatttgggattggtgaggactctacctttgagcaaaagcaacagaaagttttgttcaagattttttattgttcctctttgtcagagcaactttgccagctctattttctgcaaggtgtttctaagtgcacgtttttaggaactcaggagtgataccttagctttttcttctcattggtctggagatatggtcttcaagtctactgaggggtataaagggttatgcaaggatatggaagatttctggggtctttacagctgggtaatatggccatatgtgggcattgtctacataggtttgtcatcacacgaacaggctgcctgagtatgctgaaacagagaaaaatctctgtgttcatcaccagtgttattaaaaaatgtttcctcttttccttctggatctggatgttgggtatagtcatatattatctgctttagccaaggacatgagaagttattccaagttacctataggagaaagctttcagagtcggtgtgagattcaccattctctgtctttccatttgccacagtggccagcaatattccaaatagaggctcttttgtcagcctggttcccagcatgaagacagtgctgaactcagcccccagctgacccatgatggacatgtagcatgagcaataaattaaacctttgatgttttagcccactgagttttctttgtttttgttactgcagcataacttagctcatcctgaactttacagatgggtccaataattggtgtctgaaagaccaattttattaacatgcctcaaacaatagagcttcatacaccagagagcacaatcattcccaggagacaaatggggctggaaagacacctgatgattcagaatcctggggcacagaggaacaacatccttcctcgtcctgccattctttgccaaactcccaagcacaagtgaatcatggttcagtgactcattgtgtgaatagggtcacagagaatccctaaaccattgcttttcatatcaggagtccaacagtctttcaggttgcccctggctgagggctttgaggatttagtggagttttctggtaaatcatagctattctaatttaggtttcagcccaactagatgcttcctactgtccctggtaaggaatggaactggctcacagtaaatgtagctgtttagtaatagatgtagatattcttattatcctctctaggtcttctattctgatttcttatttttaagattaagaatttaatgtctagaaaagttaagtgaccatgtcatagctatacagaaaataagtggcagagtctggcttggaagccaagccccaagtccctgttaaaagccttttgaggccgggtgcggtggctcacgcctgtaatcccagcactttgggaggctgagggggcagatcacaaggtcaggagatcaagaccatcctggctaacgcagtgaaaccccgtctctactaaaaatacaaaaaaattagctgggcgtggtggcaggcgcctgtagtcccagctactcgggaggcgaggcaggagaatggcatgaacccgggaggcggagcttgcagtgagtgagatcgcgccactgcactccagcctgggtgacacagtgagactccttctcaaagaaaaaaagaaaaaaaaaaagacttttgacacacacacacataactgtgtgtttgtcaggaaccagaacagaaacagaaggtgggttatccctacttgtggttctcacaacaccttttgcaagtgatccctaatcaagccatgagggctatttgcaccagtgtatggttgggatacctacctaagaaataagttagaaagtttgagaactggggtaagaagatagaggagagaaggaacgtcattcacccacaagtgattttacaattcagacttcactagctacagcagaaaagaattggctttagtttctagtgcagatccacattcatagtgaaatctaaggtctgtggaccttatctcagccactgctagttgtcactggagaaaccatgccagaatgaaggacaagatgaggtcaggaacctcccaaatgattagaagcataaggtcagctctcaggtctcaagagaactgctgtaaatgatgagtgacttatagccactgacttggataaaaagaaaattggctggcttccccctctgctaatcagtgagcctatgtgtcaggagctgcctggaaaaagggtggtgaatggggaagagagttgcagagaccgtctctaaggagaggggcaacagataatccacgcttctgagggtctcttactttacacatctcccaaagtctttgcctctcaccagaaatctagcttttgttcttccctatatttgcccagaggatgaaatgacaaaggttagaagtcaccaaaagtagaacggatgaaagcgaatggtgcacacgaacatttatcacatctaagcagttcttacctgaaaagttgttaagatttcatgattcaggaagattttgtttgtgtaggtggctactttttaattcaccttcattcaaaatgaaataatcccaatgatggttttgtcttatttatgttatctacttccaattatttgtatggtttagtaactaaaaaacaaaatgtacactctctgctaaatgatgaaagtgggcccagtcagtgtttggcgtataccctgtatatctttattactggattacctttactccctgaacttgaatccctcccacaggaatttctattcctgggagatgctttacaacatttgaacactgaggaagtgctgaaaacatgagatgaaaacaggaaacttccccagcagtgaaaggctgtctggattcctgcttagctcttctgtcactcttatctctggaggctttgtaataacatctgtcactccaaccacaaacctccttgaagcccaacttttcccaaggaaggtgattctctggggtgtgccaacctggcctagtgactgatttcaccaccttgagccttccagacaaagttcacaatctcaggcttgctcgagatgggctcaactgagaccaaaagaacaaagttgcactgtataataaaattttaaaaaatatagtttctttctacacacagcccaagagggagaaggcaggattcatgaaatgagaagaagataagataattagaggagactagggacccaaatcacagatgatggccaattccaggatgtgagagtggcttgcatatttttgacaacactgctggctaatgcaatattaaaatgttttctgttctatgttctgtgttttctcctgtcccaccattatccttactctttgacacagttctattgccttagacgagtggcactttgaggaaactgattaaattgattgacatatgggttagcacagaatggagaagcatgaacatcagccaagggctgtgagataagagagttcaagaattaatcagaagcagaacactgcaacagaaggtgacttggagaagggaaacttggaccacctcctcctcctccccactccatggggagaatggagtgaatccccaaatatacggagggtaggggcaaaggaatttgagtttaggacatccttttaaatgttgtgagtttggacatcctttttaaacgctgtggagcagggtaaaacctgctgtctccgcgacgttgggggttatccgaaggagacctttgctgtgtatttgtactgaaccatcattttctttatttttaaagaaaagtagaatgcacacatgtaatacaatagaaagtaaaccttattggccatgcctgtaaacagagaccatctgaaagaaactatgtttttgattaccctgtatatttccagctcaccttgatattctacagacctttgatttcagtttggatcccttgggcttctggcttctaaatttttatttgcattttctttgttagataagtgagaaccaaacccagtgaggtatatgaacaagccatttcacctttagggttttgggatgaggagtaaaaatgctgagtgggttaatcttgcctgaaggacccaagcttatgcttcaaatttattgagattccacaaatcactcacagaaacttaaacaactgggaacggatcccagagatgcagagttggaggagtggcagggagcagagcacggtcatttaaggatgttgggtatgtggccaggtagacctttattaaaatccttgttcttatttatcatgctatcatattgataacaactctgagtcccagtttcctcctctgtaaaggatgtaataatgctacctgcgtatgtaataaaatgcatttggcacagttcctggcatatggaaagtactcaacaatagtagctgctattttatgattgataatgtaataataattattattatttaattcatgcccctcctttcatggtgagaaaatttaggcccatggaagcttgatggggccacataactcatagttagagctggaattagatatcccaactccgcatcctgctttcattcaatgagtttgtaaaatttctcacagctcttgccaagctgtggttcagttttgtcttgcacgatgtctgtatgacttaccagggagaaaagatgatgcagagatatgaccaaatgggtctgtggagcagtggatgactggggacacgccatgttggtgagctcactgtgcaggcttcctgcctttcctagtctgcccttcccttcgaaaccagatactctcacctggaaactatgcatcctttttgaccgtgatgccccaccagtgttccaacccgatctatggctcgagcagctgtttaccttcctcagaccttgacctcacattttctaatgaaggagaacagtatgatgtagtggaaagaacagtgaggtgagagttgagaaataccagtttctagttctggtatactcttcaaccagtgggcactagagataacttaacctctctgaacggcagtttatttctctaaaaaatgaggggattcaattaagaaatctctcttgagcatgaatttctgtatctattaaaaaaggagcaatgaatacttgctaagtatacatggatctaactacactgttgtttcatgtttcattgttttgtgaaaatggagaaaagaagcagtgtagtggattttttttacacaaatagaaatttgttataaatttaaaaattcttttaaataggtggtcgttggcaaacctttacaaaataaaaggcatcagtgtgtctttctttggtggatttttgtgaagcaagtaggtaatttcccgcataaaattaagatgctagctcttttatttagacccgggtttctcaacctcagcactactgacattttgggccaaatcattcttttgatgtggacgctgtcctatgcattgtaggctatttagcagcattcctgggcctgctacaagcacatccccttcctgctatgacaaccagactactgtgacaaccaaatacatctccagacattgccaaattcccagggagtagggtgaaataaatacaccccctggttgagaacctgctttaggcacatgtatgtgttaattttaatggaatgcttctgtgctcctaatcaatgtatttttattgtattagtcaggatacaataagcaggcagtaacaaacaaattccacgtggcaatgccttaatggaacaagtttatttcttgttccaaggcaactgccctccatgtggtgattgaacagcctaggctgcttccatttggattccatcataaggcctccagggctgtggagaccttttaagaaagcacacagaggctggatgtggtggcgggtgcctgtagtcccagctactagggaggctgaggcgggagaatcactttaacctggggggtggaggttgcagtgagccaagattgcatcactgcactccagcctggtgaccgagtgagactccatctcacaaaaagaaaaaaaaaaaaagcacacagagaactcaatctactcttgcatgatttagcccagaagtgacacactgcccttatatccacagagcatgatgagatttggtcttatggctcttttaaactacaaggggatggagggaacacagcccataggcacaagacaatttggagagcagtactatatctaccacaccatttacaacttgaagagttggatgcatatggtggaggcccagagggaagtttccatttctctgtcatcttttatcttgagagaggctactaatcactagaacagtgaatatacacaaattcttccttgtgctttgtgttttactctttattgaatagatgctaattcaaatcatcatgatgatattttagttgctcaacagttattttgtaaagtcttactccactcttatttcaacaaattaaagtctccaggaaagcctagaatataagcaattaaaaattaacctggagtagttatagtgggatgagtactttattttcttaagctttcaaacacacagtgcctagtgggactatggagaagtttgcagacctgtgatctactttctaaagaactttctctgagcaaatataacccaactgatctggttgtaacaactgttacattgcttggagaaaagcaatggggaggatgtacaggagcatccatctccacaggctaggagaagtctaatttctccctgagccccattagtaaagttgttggaatcccaactgctccggaaagtcccttgtggctgatgagactgaggagcacgggaccctggtgcttttgttaacattcttgcctcatgtcccaaacctcacatcatccattgccacttgaattatagttcctactcctcagtacatctctatcagcatgagctgcccaaattcgcattgtctccttcccaggccttggaacaccaatggactccctcagaaactcagattctccttccatacctggagggattaaggcaggtgtcctgaggccatatggaagcaattcttccctgaatctccagcacagatttgctttccctttcctcacttggctgcattaatcctcaactcttcctgtaaatgagttttctgggttggttctgtctttatgatccttctctttgggggaagcactagtaacagtatcatttgatatcattaattaaaaagtgccaagctacttgcttgttgttgaaagtaggtaatttcttttcaccgatataaagttaaagcatcttagaatttggggaagaaagaaatgagcacctgtgctaaggcagcatgtagaatggtttaagaggacaaatttgggtgccagattgctttggttcatgacatcaatcttataagctgcttgaacttgaacacattattcaagttgacggcctccatttcctcatctgtaaaatgggaataataatagtacctacttcacctcattgggccatgataataagtcttaaaagacttaaatttgtaaaccatttaaaagagtgcctggcatgtagtatatgctgcatacatgttgttaaattaaaataggtagatagatacgttgatattccccattatagtacaactctgctatacaaaaagaatttgctatatcctggagaatcctcaagagaaggcccaattatgattctagaaagataatagaggccaaccagaaaaccctagttagctggtaaagcagatgtcaggttgtttgccaactttaacattgaaaagtgaattttctatttggcattctattgtaaggaagaactttcccttctccagaatgaagaattttgacaatcgcaatattgtaaaaattatcattgaataccaaaaattaggtgaaagtctgatgagaaagaggacatttaccttgtcttaaattatcttcctagattttatatattgattacaaaatgaagcatagtaacttatcagtggaaaaacttggtagacactgcagtaactaagtaatcaaagctgacatcactaacaatggaacaaactgacctttatcttttgatgggatgtaatgagaacattacaaatgtaatgatcgcttgtgtaatattcctgccaaactttcataaactgacctaatcctaggaaacatcagatcaacccaaactcagagacaagttataaagtaacagtcctctattcatccaagatgtcaatatcatgtagacaagaaactattgagggactctttccatttagtctcttaaaggagactaaaataatatgataactatatgccataggtaatcctggacttggggggagggttagctataaaggacagtattggatcagttcataaaattgaatatggattctagattagataatatgaattatattaatcataaatgtactaattttgataattacactttagttatataagactatgtccctgttcttaggaaatacacaatgaagtacttactgtcaaatgattcagaaaataatttacgatatatggatgtttatttcttgttccaaggcaattgcccttcatgtggtgattgaacagcctaagctgtgtgtgtgtgttgaaataattataaagtgaatgcatgaaaatattgcaaatggggtatctggatgaagagtatttagaatttcttggtactgttcttggcatttttttggtgaattttaaattgtttgatataaaaaattaaaaatttacagaaggatatattgtccctcttgcttccaggaaaaagcacatttgttactcagctcttaaggtcagcacgaacctagataattaatatggaaattcagtaggtgcctcagagcttaggtcctgtgaggaattagtaaagaacaacaatggtgccctgctttgggtttagaatctataaagaaaagccttttaaataacctcctggaggcctgaggtatttgctgaaaattttccagatgcagttttgtcttgttgaattaaaagatcttgaggcaggcatggggcttctctggtggtagctattggatatatgtcacaccagagaaaatcatcccagatgatgggattgctggttttaattatagatatagtatacataagaatttgtactaagtgccttcattcaaaggtatgccaaatgtgggctatttgtatgcctagcacattcaccttcttcgcagctatgcatgaaaaattcagtctcttatgagggcaccagggcatcctcagttaccatgtgctgactcagcaaatgtccttagcaggtactctggtaaaagccctgagaaaagaggagacaacaaatattggtttttaatcatttcttctgggacatggaagaggaaggaggggctctatagctgaaaaggcatttgtttcctgagccaagggttggtgagtgtatctaattttgaaaatataagcaatttctgtgcataacagaggagaaaccagttttgggggtgatgggaagagggatttcctgggcaaagaattgccagcaaataagactgtggaaaactgtgcgcacccgggttgcatgttgcaacctggttgcaagtaaggacataattattttcttttcatatagcactggctggttcagagatctcaagtggctgcccaatatttctctaggtaaactctatccatgtaatacaaatttctggccagtatcggaaaaacaaacaaaaatgtttttcttttgttaaatatgtgagtgaagaacaccatactaaaattaattacctccataccttttgtaaaaattcactgagaaagtgatttcattgaaaagtttctagcaagtgtgatgcctccgacattgtttttctttctcgagatctcagaattgtttcagctatttagttttttgtgtgtggtttgggttttagaatttttatagcttttttaattaaaatttttttctattgttgtgaaaaatgccgttgaaatttgatagggattataaatctatgtatcactttgggtaatatgaacacttcaacaatagcaattctttcagtctatgaacatgggatatctttccatttatttgtgtcttcttcaatttctttcatcaatgttttatagttttcagtataaagattccttcacttgcttggttacatttttttttgtaaatattttatcctttttgatgctatcatatatgggattggtttcttgatttctttttcagaaagatcattcattgatgtgaagaaatgtgaatgatttttgtatttgtttttgtatcctgctaatttactgaattcattattcgttcaaacaggtgtgtgtgtgtgtagtatttagggttttctacatacaggatcatgtcatctaaaaacaggaataattttacttcattttttaaaaattcagatgctatttgtctcctttccttgtctatttgctcttgctagtacctccggtgctttgttgaatagaagtgaccagagtggacatccttgccttttattagatcttagaggaaaagccttcactttgcccaacttattacaaggttagctgtgggattttaataaatggcctttactatgttgagaaaattttcttctatgcctattttgttgagaattttttatcatgaaataataaacttcgtcaaatgctttttctgtatccattgaaatgatcatgtagttcttaatctttcattctgttaatgtggtatatagcattgattggtatatgttaacccaaccttgcatcttagggatggataaatgccacttgatcattggtgtactctttttgatgtattgttgaattcaatttgctactattttattgaggatttttgcatcaatgttcatcagagacattggcctatgattttcttttcctgtgatatctgtggctttggtatcagaatgaggttggcctcagaaaatgagtttggaagtattacctctacttctgttttttggaattgtttaggagtattgatgttaattatctgaatttcgtaaattcagccatgaaacaatctagtcctaggtttttctttgttgggtgatagttgattattacttcagtctctttattttttattgatttgtcagtctttctatttcatctggattcagtcttggttgattgttttttggaatttattcattttctcttgtttatccaatttgttggtgtataattgttcattataatcccttataatcttttttatttctgaggcattcattgtaatagtttttctgtttgtatttgatttatttctgctctaatctgtataattatttccttccttctgttaacagtgagcttagtttgttcttcattttctagttccttgatgtgtaaagttatgtcgtctatttgaaatctttcttctttttaaatgtgtttatctctagaaaattccttgttatgactgcttttgtggcatcctgtaggttttgatgagttgtgttttcatttgcattgtctaaaaatattttaaaattcattcctttttttttttttgagacggagtctcgctctgtcgcccaagctgaagtgcagtagtgcaatcttggctcactgcaacctctgcctgctgagttcaagcagttctcctgccttagcctcctgagtagctgggactacaggtgcgtgacaccatgcctggctaattttttgtatttttagtagagactgaggtttcagcatgttggccaggttggtctcgaactcctgacctcgtgatccaccagcctcgacctcccaaagtgctgggattataggcattagccaccgtgcctggcctttttttttttttagacagtctcatgctgttgcccaggctggagtgcagtggcgtgatctcagctcactgcaacctccccctcccaggctcaagcaattctccacctcaccctccctagtacctgagattacaggcattcaccaccatgcctggctaattttttttttttttttttttttttttttgtatttttggtagagatgggccaggctagtctcaaactcctgacctcaagtgatctgcctgcttcagcctcccaaagtgctgggattacatgcatgagccactgcactcagcctaaaatttcttttgactcagtggttgttcaagcttgtgtttgtatagacatatttgtaaacttttccatttttatgctggtattgatttctagtttcattccactgtggtcagaaaagatatttcgtattatttcaaactttttcatttctttttttaatttttattttatgtagaaatggggtctcaccatgttgcccagcctggtcttgaactcctagcctcaagagattctcccacctcagccttccaaagtgctgggattacaggcatgagccactgcacccagccttcctgttttctaatcatattgcaaaactatattaattaaaacagtatggtactggcataagaatagatatgtaaggccaggtgtggtggctcacgcttgtaatcccagcactttgggaggccgaggtgggtggatcacttgaggccaggagttcaagaccagcctggccaacttgctgaaaccccatctctactcaaaatacaaaaagttagctgggcatagtggcagctgcctgtaatctcagctacttgggaggctgaggcaggagaatcgcttgaacccaggaggtagaggttgcagtgagccgagattgtgccattgtactccagcctgggcagcaagagcaaaactccatctaaaaaaaaaggatacatagaccaatgaaacagaatgaagagcccagaaataaacctgaacatttatgatcaattgatttttgacaaagctgccaagaatatataatggggaaaggagagtctcttcaataaatggtgctggggaaactggatatacacatgtaaaggaatgaaactggatctttatcttataacacacacaaaagacaaaagtcaattcaaaatggattaatgacctaaacgtaagatctggaaatgtaaaattttataagaaaacataggagaaaaactccttgatattggccttggtgataatttttcagatatgacaccaaaagctcaggcaacaaaagcaaaaataaacatgtgggactacatcaaactaaaaatcttctgcatagcaaaagaaataattaataaaataaaaagacaccctacagattgggagaaaatattttcaaaccatctatctgataaggaattatatccaaaatacgtaaagaactcacacaactcagtagaaaaaagaaacaaacctgatttaataaataggcaaagaatctgaatagacgtttctcaaaaggagaacacaagtgaccagcaagtacatgaaaaaatattcgacatcattaatcttctaggaaatgcaaatcaaaaccactatgagacgttacctcacagctgttagaatggccattatcaaaaatgcaaaagataacaagtgctggcaaggctgtgggttaaagggaacacttgtacactgttggtgggaatgtaaattggtacagtcattatggaaaagagtgtggaagttcctcaataaattaaagttacaactaccgtatggcccagcgatccttctgctgggtatgtacccagaggaaatgacatcagcatctcacacagatacctgcactcccatgttcgttgcagcattattcacgtagccaagacacggaatcaacctaagtgtctatcaatgatgtggtatgtatacacatgcatatagatattcattccaaaataagtagatgctaccatttgcagcaacatggatgaatctggaggggattatgctaagtggaataagccagacttataaagaaaaatagtgcattatttcaattatatctggaatctcagaaaaagtcaaacatatagaaacagagtaaaatggtggttaccggggtagggagagaaaggaaatgagaagtagatcaaatcatataaacttacagttatgtgagatgaaaaagtctaagcgatctaatgtacagcttggggactatagttataataataatattttattgtatgctgaagtgtgctagaaaagtagattttaggtgtccttatcaaacacaaaaagacaactatggaaagtgatgaataagttaatttgcttaactgtgataagcatttaactaagtgtatgtatatcaagacaacatattgtataccttgaatatatataatttagaagtttccagtaaatactcccaagcttccagtgcattgctggattttgccggatttagggaccaccacttggtcttacttcatccattttgagtatataaattctgagaaaaagcacacagttatttttatagacaattattcccactgcctctgattggtccattccccactttttgattgtcttgtcctgttcaacactaacaatcaacattaacattccccccaccgcacctggttctctgggctgctgatgggcattcattgagaaatgctttggacaaggctgtatgttactgctgtaaaagaggtaagcagtgcatgaacttagagactttttctgggcccaatctgaataagtgtccccacacaggtaaaacaactacatgatgcttatctcaatatgtattcaaccaaaaatctcagagggctgtctgtcccatccccactttagctagcataacatgaagatttctcaaaacaaaagatgtgagctgaataattttaaccccatatgtctgttaaaggagggtgattattttggtcttcccatgtaagataatactaattatttaatacaaagctgtactatacttcatcaacttttcagtatagctcagcaccaaggctttcttttcagcataggttagcgttaagtacctactaatgaattacatttgcaaaatgtatgaaagaagagctccactactagtactgtggacttggcaggactcctccaaatggttaatcatgcactactttatagactcagccttccattatgcctgattaaatggtgttcagtttatccctcacctgctgagggaacatagtcttgattagcttagatattcagccaggcagtaatttttagacccagtatgggtctaagaaaagctacattgtctgtacaggaaatgaccccagcttagaagcattttatcacaaagtgtgtatggatgtttgaaaaatccctcattaatgtaatcctccatctccttcctctttcttttcccttaaacacctcttctctacctcgaattggaaaggaacttttagctggtgaatgccttccacaatctgaagtaatttaccattgctagatgatgtcagtgggctgataagctggctgttattagtactatgctgatagtaggctctatctatgctttttttgggattgttgataactttggatatgaacagagagtgagtgaagtcctttatgttgtttttttttttttaatcccgaaagtactctttttttttttctggtgttatctaatccacaattctaatcaaagcttctattcatttgtttattcatctgaggtattttagaactcctaatatgtatcaggtactataataagagttcactggtggaaaaaacttacagaaacacaagtaaattagagtgatgcatgctattatcaaggataggaggatcatagaagtcctacttggctctccatgtaatctttgtctttctggtgtgatagttttggtagttatacttattaatacataatttctaccacttaaataattctccatgtatcttctataaactcctttcagatggctaagtataactccccttgaggatgactctctagcctacattaagttctcactcttccgaattataaccctatttggccataatgtactcttacagcaacttgccttatcatctttgttgaagtttaaattttgtcacatttgtaaaaaaatatctaatagttttgcatctgtctccccagttaaactacaagttccttcagggctaagacttgtcttgtgcttctcgaattgtacatgggaggggcactgttctagatttcaaggagtctgaattctagcttcaattctacaacaaactggctttgtgactacaagccagacatttagtccccggggttgtttaatattctagtatacaaatgtgatgtttggattttcatgtctctttaagttctaaagtccagacagtatagcccagggctcttagctcagtgtctagagcagtgccttaaatgtcacagcactcaatttacatctaaaagtcttttgaatacagatggtctctgacttataatggcttgacttataattttttgactttatgatggttttatggggcattaaatacattttcaatttatgatatttttgacttacaatgggctcattgggacataaccccatcctaagtcaagtattgttaattattgttgggtgcactcaaatgtggtcaacttcgaatagctcaccatttttcaaaagaaatcctaaaatgctgtgaatggacttcatactaagtctttattgacaagaaccaatggttctcctcatgatagtgagcataactgtggaatcaaattccagtcctgttcctagctagctgtgtgaccttggaaaaattatttattgcctctgaccctcagttgctttatgtatattaaaaataaaattaagaataatgcttgcatcagtgtcgttaggaagcaaggacaaatcttagttgctgccttgagctgatatagaaatgaaagttagatatatgttttataaattacttgagttttaaactttttgtcttttaacttgaagcttgaaataatttatccaaggattttaagaaactgtggcaaaggttttagagtaaattctgaactttccagatgggagtatttcaaggccacagagttttattaaggcatgatggctgccttggctttctttgggtgggcttgttggtctttagtagcatcattactttgtagagtagattgataaatggaaaagcagtgaagtctaatcagctaggattacgcctagcagaaacctttcatggtaagctgatgggcaaaaacactgaaaataatagccatgcacccactcacacaagaactgaaatatctgggaacgtaatgctagtgcatttgtgctccgttcccctaacagcacaattagtgaattggaatcagatttcattgcctggcattctcctgagatcttttactttctatccttctatggccccattcccaagcatcataatcagaaaggccaatttacctgaaatgaatatgtaacttgtttcgaaatgaaatgcagttggttattggattgtcagtctcttccatttgtgtggctgcaattttcactattttaagggtctgctattgaaacagcttctgtccattcacgttagaatgcaaggttcacatttaatagtcttaagggagagcgcctggcgcttactgaattacccagtagaaccattctgggtacttggtgtcctggagtcaccaaactgccttcttggaaaacagccaaccataccccaaataatagaggagccagattccagggctaatagtaataaatgtttaaaagaatgaaacacattatatttaaggggaaaactaccctttgggttttttccctggaaactttagaagtaatgactaaattgaagcaacaatcttacaaacaaacaagtacacctctggagatgtcattttaatcacagcatactgaagagagcctgtagacattagccaaacacattatttcttcttattatagcaggctcgtttctcccatttaatagcagtagctcacacatagctctaaaacctggagtttgttttattgaggaatgtttggacctaaacagttgcttcattattttcttaaattcccagcaggtgatcttcaaaagacacgcgaactcgattaaaatcaaatagcaggcaaagctaaaacattcatattcccctgtaagtatcttctggtctttcttcagtctctggctgttcatttattgcagcttccctatgatttttccctttgtcttacacattctggctggcttcatttctaagctttcttaattcaatccaccaaatatctggcatactaacatttcaggtgacagaggaagccaaatataagctggttatagaattcaagattctcaagattcttcctcctacctctatctgtgctgtgaaaagaagaattagcccgtaaatcccagacatactgatacttggatagttagcccatgaagaatgtcatttactcagcctcttgtatgatccttctttggggataacttttataatgctatggaaaggctctggctatacttgttacagtcctcacacatccatcaagagatgagaggtagagtgaggggaacatgcgcagaaaggaggagacatcgctgggaattacagatatttccaacacgatcaattaatcagatggctttttcagataattgctcacaaatctttatactacgaggaaggatttctgggctccattcatatcactgtgagtggcagttggaaaaggagcatccagagctaactgaatttagctagaagacagatcttactggtattatggagggacttaactccttggaagaatcttaacaatgtcttagggtttgttaatttaattttagttgacttaattttctactaagagtatagtgttctgttttcagcaatagtaagaaagaatgtcttgtggaagcaatttcatggttgcctttcatgtaaattttagaagcctaaaagcacaggcgatcaatctctagtctacttggtatcccatcataaagctgctctccaaacattagttgcttcttggtctcctgactgaactcttggcattatcaataaagtaatatttttaaattacttatttttgtgacctatagtatctcttgggataataaacttgatatgcttattaaccaaggagaatttttctctattactcctagatttaactttttaaaatgttgatggtaaagtctgtattcttgttagccacacactttaagattttagactctttgctatattcttttattcttttactttgtcttttcaaaccgaagagttctgtttcttagtctgttctcataaagaagccccttgttcagtttaatagctcttctctggttgtctccattccagttcttggttttcttgagctataatgaccaaatgatacacatggctccaggtgtgggtaaaccatgtttccatagagggggtggataaagttttctgctccgtttccaatagtctttttcatgctgtttaggattctgtagccttctcagccacaagagcacattgtgcttatttcttcaagtctgcagtatgactcttttctgagtcataattgttcagattattttgagagtaaggtacactactatcctttgtttatctaacctctgttgctactgaaacatttggtaataaccagggatctttgaaatagtgtaggaaaacctcaatctattgatcccagatttattttctcctggacaatgttcttattttaattgaatcattttttccattacaagaatttggttttctaaaggagtgaggtttcatggtgggaaacactttatagatggcgtagatatcatatttttttcaaagttagtatactgagtgtacttttaccacatcagtattttgttcttcataacattatatgtataatgtctccattaaacatgtaatatataaacactgtgcgttcagtgttccagtgaagaggacagaaacggaaagcagaaaacatgaggtttgattcagatggagtctgatcagggcaatttaagctctctctgtctcaaaacctcagcattaccattcataagtcaaagatggtaacccttggactgacattgtaaaattaatagcatgatccttctgggggtatttggagatttttgagaagaagggactatttaggtttaattgatgatagtattaaaacaatgagtcgaaaaaagtttacatattacttatggcagtatcacatactgattaacagaaagactccctggactcagacttaagtaagaatctgagctcacctcatattgcctcagtgactttgggggagtttgttgaactttctctcaaccccaagtttactgggggaagaatgacaatgaaaaattgtatatatgtaaggtgtacaatgttatgtttcgatgtattcacacattgtaaaatgtgtctagtcccaagtagaggaacccacaccagattaatggtaaagtctgtagtaatgtagaaccttactaaagtcaaagacaaagagaaaattctacaacagcaggaggaaagtgtgtaaaatgattatcacaatcaagctaacatatccatcggctcacttagttactattttcttttttgtggtaagaacacttgagatctactctctcagcaaatttcaggcatatgatatatttgttattaactacagtcaccattctgtagattgggtctccagaaatccagaacttattcatgttataactgaaggtttgtaccctttgactaacatctcccttttctccccatccccagtctcctgctaaacactgttctactctctgttactttgagtttgatttttttaaaggttctaccattagtgaggtcatgcaatatttgtctttctgtgtctggattatttcacttagcatgatgtcctccaattttacctatgttgttgcaaatgacagtatttccttttcttaaaaggctgcatagtattccattgtgtatatatatatcacattttctttacccattcttctgtattcagatactttatttccatattttggctactatgaataatgctgcaacaaacgtgagcatgcagatatctctttgagatagtgattttatttccttcagatatatatacccagaagtgggattgttggctaatatggtagttctattttactttttaaaattgtgtttatttatttttgattgacaaaaattgtatatatttatggtggacaacataacgttttgatatatgtatacattgtggtatcactaaatcaagccaattaatatatacattacttcacatatcatttttatgcattgagaacacaaaaatccctcttagcaattttcaaatatacaatatattattattaactataatcatcaggatatacaatagacctctggaacttactcattctaactgatattaccaatatctccccaatgcccccatcctctagcccctggtaatcaccagtcattctgttctctgactctatgatatcaacttttcttagattccacctataagtgagaatcatgcagtatttatctttctgtgcctggattacattatttcacataacatcccccaggtctatctgtgtcacaaatgacagggatttttttttcttttttaaggctgaatagtattctattgtgtataaataccacattttcattatcctttcaaccactgatgaacacttaggttgatttcataccttggctattatgaaaaatgctgccatgaacatgagagtgtgagtatctcttcaacaaactaatttcatgtttttggatacatatccaatggtgggattgctgggtcataccatagttctatttttaatattttgaggaacttccatactgtattacataatatcataccaatttacaaattcaccaacagtatactagagttcccatgttccacatccttgccaacactttttatcttttgtcttttaaatactagcaatctgtaaaaaccacttagcataatatttagaatacaataagccctaaatatactagctacaataataatttctactactactattattattaatttgggacctcaggatttttcattataactaaatttgaaatttatccactatggtagaatatattgggtaaatgaattaaagtttaaaagcttatagactaatgaaaaatgttttccaattactattttatatgtcaaagtaaaattataattaaacttggtatgtaaaaaataaacacataaaacattacaatataataagggctacttcagaggttgcataaagggctggagaatccagtgactattgtggatacctgtgatttatgagaactactttttgtaatatcacccactttttcctctgtggaactcccttaggtgatcttgactccacctttgactccaaagctggatacttgtttctggcctggccaatcacagcattgtatcctgctcacagagtgactggttcaaagactgatacaggactgtgaaaatcaggcataggacttggtttaaacgtctgggagagatgcttcttcctctttcctgaactcaaaattgtgatgatggaatcccagaatgattggtctttatattgctgtagtgaaagaagttcctgtttgtcaatgggaccagcacagagggccacagagcagagagattgagactaggtcctaataatcctgacatttccagttactaatacctttatgcttaagctaatatgagttgggtttttattacttgcagtcaagaaagtcttggcatatacaaataatgaattagacttggacaacaagaaaggttctataagaattgattctaatatcatagaatgaggtggaatagaaaaaattcaaaaatgggcaaacttttaagataaaggggagtaagaaggccgagacacaaatatatgaaatggcatgtttgaaaaatacggtatcagtatggccaaatcttataaatctctgatggtaatgttttgaccagccagttttcttctatctgtgggcagtatggtatggtttagagaaaatgagcttgggagaaatttaaatccaagataaataaattattaagtgtatgcctttaggaaattacctaaccttattgaaactcactttcccattctttgctatgagtataaaaacacccacttttcatggttgtttgaaagactaagttaaaattatgtatggaaagttcctaaaacagttcctgcctgtcatgaagtctgttgtatttgatatataagtacagctactcctgctcacttttgttttcttattgcttggaattttttttttcatccctttccttgcagtttatatgtgtctttacgtgtgagatgagtgtcttgtaagcagaatatagctaggtcgctttttaaaaactccactcagccagtctatatcttttaagtaaagtttaattttttacctttaaggccattattgagatgtaagagattatttctgtgattttattaattgacttctggctattttgtgtgtcatttattcctttcttgtttatcattgtgactgtggttttctgtagtggtaacatttgagtcctttccttcctcttccttatttgtgtatttgctttatcagtgggttttatacttccatgcgttttcatgatggtagctatcttccatttgctgtcaggtgtagaactcccttaagcatcatttgtaggaccagtttagtggtgatagaatccctcagctattgcttgtttgggaaaagttttatttctcctttgtatatgaaggattgttttggagaggttattgcatccttagcagatttttttcagcactttaaatatatcatcccattctcttctgacctgtaaggtttctgctgagaaatctactattaatctggtgtgggttcctctacttgggactagacactttcctcctgactgttgtagaattttctctttgtctttgactttagtacgtttctctatagtgtgtcatggagaagacctttttacattgtatctatttggggacctcaaagcctcctatatctggttgtctaaatctcttgctagacttgtgaagttttcagctattattttgttagataggttttctatccctttcattttttctttgccttctgggacactgaaaacttgaatatttggttgccttgtggtgtcctatatgtcacataggcttcgttcattcttatttcttatttttgtctccatgagttatttttaaaaacctgtcttcaagttctgagattgtttcttctccttgatctagtccattgttaaagctttcaaatgtattttgtatttcatttaatgaattctctgcgtccagaatttgtttggttcttttttaaatgatatccacctcttcagtaaatttatcattcatgtcctgaattgttctcctgatttttgtcttgcttttatatattatcttgtatctcactgagcttccttaatatcggtattttaaatttttttctggagttttataaatttcttttttattggaatccattgctggagaattattgcattccttggaaggcatgatatttccttgctttttcaggcttcctttgtttttatgttgatacctgggcatcttgagtaatagtcatttattctaattttttggatttgctttcataggtgagaactttttcctggagaggtatctatggtgttggttgggtagggcactttggctttgtatctgggtatatgcagtagtgcagtttccacatgatttctttagctgtaaacagtgtcagtggtgtctgctatttcctcagtggcttagggtgtggttgttagtggaggctgtggtgaaatttttctgggtaccgggatgccagctgggccagttcttggaccttagtggctgcagtggtgggtcaagcctactgccctctccttgggccctggggtggtatatactggcactgatgtcagcaggcccaggtgggttaattcttgggcctccaggtggcctccttcagggctggtagtggcagtgactggctgggcatgatctctggttcttgggcagaaggtatggcatgggcaatatcagtagcagtaatggaacaaggctctgattcccaagcagcctgcactggtgtcggcaatggctgggccacaccccaggctggcaaggtggtgtgtgtgtgtgtgtgtgtgtgtgtgtgtgtgtgtgtgtatgcgtgtggtagttgtagtgatagaggcagattgggtgggcctaacctcaatcccctgggaggagtgctcaggcggcaatagtggtagacagggctgggcaattcccaagtctccggatgttgtttttgggcactggaatggtgaggccaggttggctgaacctgtcctcaggtccccttgtggtacacgtaggcacttgctgtggtaggcagtagtgaggtgataggtaggcaggaacaaaatgcttcggtgggggtggtactgtctgcactgcaaccctgctatgtgtggttgttttcagtagcagcagccataggcaggcagctgggaagtgcaagctttgctcacactttggccacagcagtagtggctataggcaggggagtctgttcttaggacatatgaaaccgtgtggcagcttagcttagggacagcagagttgctcccagtggctcctgcttcggccctggtggccatagccagccatagcagttggctgtagatggcaggtatcagtggagctccaggaatgtggagatgccagggctgttgagccccagagggggctgcattctggtggggaatggctctgaaaatggtgccttgctctatctgcttatgactcagaagtgtgtgggagccagacttgagctccctctctggagcaatgtaatcttgtggtttccaggcagctccctgtgttagtcttagggcccatgaggattgagggcctcttctgcagttaggatcacaggagtctaccttgagcatgtggaccattgggggtccctcatgtaccctttcccacattggggtcctctccagattcccagctgatcctggctgagcagactgcctcacttccctctccttccttgcttgaggggttgcctatcacttccctgaattccagcgttctcttttagatgatctatttgaagtgtgattatgtacttgccattttggctctattttttggaggaggcaagtaccagatgactctagtaagccatcttgaagccacccacccctgcatcttttgttgttattttttatttttctcttgctattttggtagggcttcttcttcttctttttttaaataaatacttgttttaaattcacattttactgatttttgtttttaatttatttacaaaataaatgctatacattgttctcaaaaccaagctttcgctgctttcagaagttttgagagaactctaatgattttcatcttttctgaatagtatttatttgtaaattttaagtaataaaatcattcattgtaaaactatatacagttgaaatttttggtatatatagataaatataaaaaataaaatcccaatactataatatttgttatatgtagataaatatgaaactaagtattgttattccaaccctccctgagctgtgacaactatcattggcattctgatgtacttccttctagtctttctccacaaaggacaggcttttttgttttaaacaaaattgtgattccattatatgtaaggctttgttaattccattataagtattttctttttcttttttttttttttttttttttttttttgagagggagtcatgctctgtcaccaggttggagtgcagtggcgcgatctcggctcactgcaaccgctgcctcccgggttcaagcgattctcctgcctcagcctcccaagtagctgggactacaggtgcatgccaccatgcccagctaatttttgtatttttattagagacgggggtttcaccatgttggccaggatggtctcaaactcctaacctcgcgatccacccacctcggcctcccaaagtgctaggattacaggcgtgaggcactgcacccagcccatcataagtattttcatgtatcatcatgtattttagaaaatggtattattgactatatatcagttcattgtgtgcacacattttatttaattaatttgctcttttcagttatttagttttctttttttgttattataaatttcatagtaatatatgtccttatacataaatctgagtatgaatctaggattatttacttaaaatgaatttccagacacaaattgtggggttaaagtgggaggagcatttttaaagcttttgatatataccgctaaattgtcttataggaatgtataaattatgaaacaaccagctgtccatgtgagaccatgcatttccttatccaaatgaagttaaagaaattatttgtcagcttttttggtggtatgtggtaactccttttcctgatttgaatgtttttctagtactagtgactttttacaggtttttcttatgtttgttggttgagtttttttttttaatgtctatgcctatcttagtatctatgcctattttaattttttaatgtctatgtactttcttttggagcatgttgtatgatattttataaataaaaggtgttaactctgtcattatagtgtaaatatatttcccaatatgtttttaaattttcatttatgatatatagaaattttaacttttatatattaaaaatatctatatttaaatgactttgtccagatgtagtgactcatgcctgtaatcacagaattttgagaggctatgtcaagaggattgcttgaggccaggagttcctggccagcctggacgacacagtgagacccctatctctaaaaaagttttttttcaaacaatcctgccacctcagcttcctaaagtgctgggattacaggcatgaaccattgagcccaggttctttgtaatatcttcctccacgtttttacgtatcaatcctgcattcaaacatttactcattctgaaacaaattttagtatatgttataaggtattgatccaaatttttacgtttataaatagttaacatctccaaaccatttattgatattaatttcaccttcatcatattgtaaattatagttttgattttcctttttgacaatgaattatctaagaggatactttagaattttcaaacttaataaaaaacttttgcattcaaagactgtattgtctgtaatttctatattttgttactttttgagtgtctattataatcaaatataatagactgaacttaagtttagtcaatgttcaatatagttttacaatgaaggtttatactgcagctacgtgggataaagatatacaatgattcatttaattctatttattttgttgtttaacttatctgtgataataattctaatacttattttttaaatggttaagtttaacaaactttaaataattacttggtaagattttcatttggggataatgtccaaggttcttgctagtctaatgtaccttagtagcactttgttcattttcatggtgtccacaaattaaactatagtaaaatgtgtgtagttattgacttactgtgaattctatgggggtaaagttgatgccttcctgaacctattctggcacaggattcatagacaataaacacttttaaaatgcagttgaatttcacccaagttaaatccaatgcaaacctgcaaggagaaattcctaaagagagtaaatcctagaaatagtaaagaaaatcattgtgtcctcaatgccagacttatggtaattgagtagaaagtgacaggctttcaaataggattctaatgactgtttatctctgcaaagatttacaagatactgtctactcccataaagttgtcccctgaagaactcaaccttgacagtggattgaatttggtggccctgggatatgggatttctatttctagaaaaacagacactcatcaagtaaactacaggtataccttggagatactgcaggtttggttccaggtcaccacaataaagttaatattgcaataaagtgagtgacacaaattttttggtttccaagtatacatgaaaattacatttacactctactgtagtctatccagtgtgcaatagcatgatgtctaaaaaatacataccttaataaaaaatacataccttaataaaaaatactttattgctaaaagaatgctaacaattatccagtcatactctttgtgttggtagagggtcttgccttgatgttaatggctgctgactgatcgggattgtggttgctgaaggctggagtggctgtggcaattccttaaaaaaaagacagcaataaagtttgctgcatcaattgactctttcttttacaaaagatttctctgtagcatgtgatgttgtttgatagcattttaatgactgcaaaacttctttcaaaattggagtcagttctctcaaatcctgccagtgccttatcaactaaatgtatgtaatattctaaatcctttgttgtcatctcaacaatattcatagaatcttcaccgggagtatattccatcttaagagaagactttctttgctcatccatgagaagaaactccttatcaaggaaagttttttcatgagattgcagcaattcagtcacacctgaaggctccacttgtaattccagtcctgttgctatttctaccacatctgcaattacttccttcactgaagtcttgaaccccttgaagtcatctataaaggttggagtcaacttcttctaaactcctgttaacattgatattttgacctcctcccatgagtcatgaatgttcttaatggcatctagaatggtgagtctttttcagaaggttttcaatttattttgcacagatctatcaaaaaagtcattatctatggcagctgtaaccttaaaaatgtatttcctagatagtaagacttataaatcaaaattactccttgatccatgggctacagaacggatgctgtgttagcagacaggaaaacaacattcagctccttgtaagtctccatcagagctcttgggtgaccagatgcattgttactgattttgaaacaaatctttttatctgaccagtaaatctcaacagtgggtttaaaattttcagtaaaccatgctgtaaacagatgtgctatcatctaggccttgtttcatttttagcacacaggcagagtagattgagtataattcttaagggccctagacatttcagaatggtaaataaacattgacttcatcctaaagtcaccagttgcattaacccctaagaagagagtcagcctgttctttgaaactttgaagccaggccttggcttctctctagccatgaaagtcccagatggcattttcttcaagacaaggagttttcatctccattcaaagtctgtttagtgtagccacctttatcaattatcttcactaggtcttctcagtaacttgctgtaacttctgcatcagcacttgctgcttcaccttgcacttttatgttatggagacagcttctttacttaagcctcatgagccaagctctgctagcttccaagttctcttctgcagtttcttcacttctctcaggcttcctagaattgaagagagtagaagtcttgctctggattaagctctggcttaaggaaatgttgtagctggtttgatctttaatccagaccactcaaactttctccatatcagcaataaggctttttcactttgttatcatttgtatgttcactggaatagcacttttaattccttccttcttttcctttacatttacaacttagctaactggtatgaccggcttaacttttgacctgtctgggcttttggtatgtcttcctcactacgcttaatcatttctagcttttgatttcaagtgagagacttacaactcttccttccacccgatcacttagaggccatagttgtgttatttattggcctaatttcagtattgttgtgcctcagagaataaagaggccagaacaggagagagatggaggaacagcctattggagcagtcagaacacatacaacatttatgaattaagtttactgtcttctatagctgtggttagtggtgccccaaaagaattaaaataataacaccaacgctcactgatcacaggtcacaataagagatataaaagtaatgaaaaactttgaaatattttgagaattaccaaaatgtaacacagagacacaaagtaggcacatgctgttgggaaaacagcactgataggcttgctggatgctgggttgttaacaaaccttcaatttgtaaaaatgcaatatctgaaaaacataataaagacaaatgcaataaattgaggtgtgcccgtctagtttgtatagtatagaagatattgaaataatcttcccagaaaatcatatatcaatccagaagagccaagagcctcctctactccagaccatcaagattctgccaatgttctctgctagctaagccctcatgggacttaaaagattcgcttttgctccatgataaatttcagcataggagttttaaacttacattggtaactgcatatccagcctcagcctttctagataagcagctattctcctctgagattttcccgtgatgctctcagtgggacctaccaactagccctgcttttctcagtctgggagtccttcctcttccactccttttgcctctcttctttgagaaactctcttctttctttttccctgggtacttaacatctaacattatttcctcaagagtttgggttttacagggttaatttaacacaaatgaatatctcaatgaattaccttattaaaagtgctagactctcattctctctctctagaaataagctattttttttttcagggcctatgtgtgcaactaagtgagatcctgctttgataccccaaggcagagtcagagcaagcctggctgaggctgtggtggcccttctgaccaaattcagagtcagactgtttgctctatggaagtctcttgcctctcccttccagaccttcctctcttcatttcttgcctaggtgtgttagaccctttcctgctttcttgaattttgcttcactctttttccctccctctgtctcatgaaccccagaaggaatgaaattgtggtccatgtatgaattcaatgggcagacatatttgtttggtttccactgcggggaaaactgtacagtgtgcatctcatttgaactcgtggtcaatatttaacatttggaaatttcacataagaatccctatttccaacttctctgaaaatttgaaagatctggccacactgggcccacatttgtggcaaacaatgagttggagtccttataaaattatgctgagtgaaagaaacaagttacaaaagaccaggtattgtatgatttcatgtatatgaaatatccagaataggcaaatctgtagaggtgatggattagtggtttcccagggctgggcatttggagggaaatggggagtgactgctaaagggcacacgggatttcttttggggaataagaatgttctaaaagcgattgtgataatggttacacaaatctgtcactatactaaaaataatggaattgcacatattaaatgtgtaaattacatggtatgtgaattatatctcagcacatgtttaatttttttttaagtgggttgtggttatgtagcatgtaccttccttaggtgggtacctgccatagtctccatagttccatattgactgccctacactgggacccagttaacttctttgattttggcctctgttggcatttgacattttagcctcagttcatattcatgagcattttcctttttctagtacctttatcatgataagttcccttttcttatccttttcctcatgaaaattacctttactggtcatcctagagcacatctcctataatattttttgacatgtagttatcaagtttctgacaaagaaatgtatttccttattagtaacaatattgctataaaattatacgttatcaaaccaaactgtcttataaatacaacctggattctgggtttcataaacaaacacagtgcactatgccaaccgaagaataacaggaagtactttatgaccccacattatctaacagttctcccctaaacatccctgtagcatgaccaggcaggagatgctacaagactgggaacagagctgcaatcactggcatttttaaacagcttgttgatggactgggcttgtgagaaaaccaacattacactgaaactcttagggatactttaaattggtggattagatggtcgcttgattaagtttgggttatgtaaacagtggagtgtttagatttaggcttggctgttggagtctaggcagctgtttgtacttaagtccagctagaagtcttgttaatcaaagaactgactgaatttctttctttctcccacccctgcctgcttcttttttttgtacctgtgttgtttttccccctgttcaaaccctttgggctcaggactgtaggtaggcaaggcagagcattttgaatgtttctctgaggaccaggaacttatttttttgattacacagtgatgtgccccacagatctccctcactgtgaggcaatcacttcatttatccaagttctacaaagcctttattatttcggttagttcatatttttgaagctaagtcatcagtttgatgcgtttgttgtaaaatgtggtttaacagcttgttagcacatttattttttttttaatggaatccaaaggtatttcatgcttgagcagcagtggatttaagagccgatgaaaagccccgcgagctgggcgcagtcagcacaaaacaatgcggggaacattgtggagtcctacgcagagctacccccagcagtggcgtgcgggtttcttgaactttaagttacgttttttgcttttctttttccctgacagtgtctcataaataacccatgttgccttatgcgtgttggtttcagattgtctaggatgtactggatcatttgagcagtctgcgttcatgtggtttttctcccctctgaagatgattcgattctgttttgtccacaaaggggagacgtggattgctgttttctgtcctccaagtgtggctttgtaaagctgtctcagaactaacgggttggaactgaaaactattatggagcttggtgaatgtcagcgagcctttgaaaagtaaaagctgggaagcgacaaactctttccacagttccatcccaaatacaaacgaggtcattttcttgggaggcagcaaaagtgagcattctgtgtttgaccaaagacaaccttttggttgaggttttgattatccagggatgaaatggaggcaaatggtcttctttgcctaaatccagacctacctttgtaccaggctaggtatttgttggattgaaaggagtgcagcccttggagagcagtttcatggaactggaattggtaaaaatgggctttctgattatatcttatatattattattagaatgtattattacatattagatctatattatatctaatatagatctaatatattagattataattagattatattaaattataattatatattagatctatattattatatctaaaatgttttaccttaccagccttgccatttgcatatctgtgttgtcagttcataaaccagattacaatgattttttaccattcaagtcagaactcttatatttcatttatattccagaaagtagagattaaagaaaagtattgagaagagaaggctaatttcttcttacataataatatctgtggttctcaaattgaaatgacagctgatatagtgcttagagcctaaattttatttttatctatctctctagaaagagatattgaaacacataagggaaagagaggagaccatatgtgaaaaattaccaactactttgccagtgattacctaacaatgaatgagattcacctttccaatctgcccacacctccaatgtctctttgaggttgagaacataaatcgtaacctctgtgtgaggcaatcttactttcctaaagaaaaaaaagaccgctgttaatgacagtggtgctcgtgtacataaagattacaaaagctggtcttggaagggacctttgtataaactactccaactatctgattttgtagacaacaaaacagactaagaaacttgtttcttactttcgtgaatggggggctttgaatattcacatgcaagtttttgtctgaatacctgttttcaattcttttgaagtaggattgctctgccatatatgctaattctatgtttaacttattgaggaacctccagattttttctacagtgggtgtaccatttacatgccctccagcaatgtatgagggtttcgattctccacatgctcagtaatacttgttatttttccattgttttatttattacagccatatagccatatcctagtgagtgtgaggtggtatcttattgtggttttgattttcatttccttagtgactagtgatgttgcgtatctttccacgtacatgtttatcatctctatatattctttagagaaatgtcattcaatcatttgcccattttttaatggagttgttttctttgttgttgagttgtaagacttccttatattttttggatactagatcctttccagatatatgatttgcaaatattttatcccattctgtggattgttttttactcttttgataatgttttataatgcaaaataatttttaattttatgaagttcaatttatttttttttctgttgttgcttgtgcctttggtgtgatatctaagaaaccattgctagatccaagggcttaaagatttatctctatgtttttttgctaagtgttttatggttttagctcttatatttcagtctttgattcatttgaagttaatttgtgcatataatgtgaggtaaggatctgacttcactcttttgcatgtggatatccattgtcccagcactgtggaagagactgttctttctccattgactgaccttagctcacttgccaaaaatcatttcacccagttatatgagtttttcctgaacttttcattccattccattgatttatatgtctatactgccagtatgcagaaattcagttttgtttttctctttatctgaagttatttagaaattattttttaaattttaaattgaagggattttgtgagcaatatctatgttaaactaaatttttctttcactggtcaaagagaatgcagatctgcatatgatcatttcattttctttgaaattcagcaacttcattatgtgttgcttgtttttcctggaacaagtcttttcaaagcagcggattcatatccttctttcaagcaagttttcttctattatatctttcttcatgttttgtttttttcttattctctccatcaaagaattaaattatgtgtgtatgatatatcttctgcttgtctcaacttccactattttagaatctttgctcttgtctcttcacttgtgtgatttcatcaagcttttcttgtagtcacagttttttgaaaattgttttttgataccttttcttgcttcaaatgtagatttcatccttgtaatgtatgtgtgtatatctgtctatctgtctgaacatatttatagtggctgttttgaattctttgttaagtcagacatctaggtcctttcccaagctatttctgcctttgtttttctgtgtatgttctgtttctttgtatgtctcttttttttttttttttttttttttgaaaactgggtatttagataatatattttagcaactctggatattgattcatcctgcagggcattttattttgattgttgttgtttgcttatttatttgtttgataacatgtctggactattttactgatgtctattcctccttctctactgtgaggcctctgatattcctccttagagggcacagccttgggtacacacacggtcacctggtgaaagttgttttaccagagcttttcttaactatctctttccctgctctctctgttaagctattggcttttattactatcatacccggctgttaggcatctctaattgccatcagattgctctattgttatcaccagtgtcctgggacatagattaatccatagtctcatccaattaaacttgaatctctttgcagggttaggttataagccagtctttgaggtttgctctgaccacagtaggggacttcttggctgtttccctagttgtctctgataatctatctggcttatagtttagtgtgttgctctcaagaagttaaaactttacaatcaaagtcttccctgtttgtgaaagtgtccttaggtttgaacttccccatactctgttttatataaagtcagttcctttggggagaggttaggtgttctctgttcttatggcctgcctctctccttgggaaatatctctgagctactgctccagagaaggtggtggggacaatggctgtttcttctcttggagtaatattcctgatttagtagcaataaatagctgttagtcttcttagctagcttcttgcaatgtggaacttctatcctgtgagtgagcaggaatgagggtgatagggttcctggtaacctcagcctgctgagcctggggcagagcttctgtcctgtgagtggggcctgggtgaaagaagggagcgcgtgacctcttggctgcactagcctgaaatttagcctctgtgacatgaaagtgggagaggatgggaaatactggtagtctggtcctactggggagatacagtaaccctttacagggaactgaagcctctgtcatactgaactgggagtagggaaacagagaacaggtcatggctcaagtgcctcaaattctcagtgttcttgccaagatttagtagacttttaaaatgtttattcattttctgcatgctcttaaaacaattttcaaaaactttaagttaaaaaataataattttcaccaattatggttgtttggctagggagaagatctgtggaacttctcatgcctccattctctctctctatttttttattctttaatctttttagaaggcttactttttacttcctcctgttattcgaatatttatgttttgtgctattctttatttataatttgtcttactatggcaatctgtttgtttgtttgtttccttagtttctcctaggttgtgtgtgcttcctctgtctttggctgatattccttcccttgtttttgcattgtggtttctgctcataagtccataactggttcttttctctttgttacttatcctcagaagggtcaggctgttttctattgtgtttcaggggtagaaaggaagtttgaacagcttgaaatttctatttgaatttgttttttttttttttttgaacactttaccaaatcttttttttttttttttttaatacttggcacagccctctccatttctgggtaactcacagtagtacatatttagtcacactccctgtgctgaaacctagtgatgactttctcttctccttcttggccgtgtctcacctccagcagtctctctgggctcccaggataggtcatagacaattagaaatggcatatgtatttgtccttcaacttcacctctcctgctgttcattggtttcagattgggtcctttgagggacatcatttgccttttcccatgcccggtccacagagtttgattttactactagcaaagaaccacaagacaggcctttcaatattgtgccacattaagcaggaaacctgtctcctgatcagtgtctgaagggttctgtgtcagctctaacagtgttctgctttgggatccaaatagctctgtttgtaggcgcatctaccttgtagttttcatttttggcaggtttcttttccttatttcattgaaaatgaaattggtttttaaaaagtctcttactgtttcttttcagcatatataatgaagtaaaaaaatgcttttcatcctccacgtttaaccagatagcaattttattcatatctattttgataactgatgtatttgatcaattttctaatgtcttgtttgtgtttaaaaatgtactcccttttttttgatgttttctcgtttctttttatatactgcctttaatatgactgatagagtattttttttagtgtttgaggtttatatatacatatgtttcttttctcttacacatttcatctgagttacttaagactttctattgatcttagtgttaatatcaattatatctcttaacagacaaagcctttagcaatcttccattattttccccttaatctctctcctattttccatatcttgttcaaatcaccttgtaattagaatttagattcacttgggagaaaacttcagagacagatattttgagtttgggttctactgcgtctaatatgcttctttgagtaattctcttcaccaactgcaccaggtgaaatactcatgactcttacttgtttgtttgtaaattgaaaattggaatacttcaaagaaagttgtgttcacaaaatttgagtactcagatgtttctgggtacttaagagcaaggaggtcaatctctatcatttaggatgaatctgtaacttttgagacatgcagcattacagctggctgcttctttacagagattcaccttactggcaatacatgttgaataaattagtaaaaacaaatcaattgcataggaaatttaagtcaatacaaattaagtgctttctttctacatatctctttgccatagaacttaacatttggttctgcctatgattagatatttttcactatttttgatacacagacattttggtcatttttcttttttcttttcttttttttgagatggagtctcgttctgtcacccaggctgaagtgcagtggcatgatcttggctcattgcaactttcacctcccaggttcaagttattctcctgcctcggcctcccaagtagctgggattacaggcatgcaccaccacaccagctaattttttatatttttggtagaaacagggtttcaccatgttggccagtctggtctagaactcctgacctcaagtgatccactcgcctcggcctcccaaagtcctgggataacaggcgtgagccaccgcatccggccttgtaaaagagataaatactttcttttttagctaatgagcttgagcaaactaagccaggtggataagatgatagtcgggcataaattatataattccctgtaacaagacagaccctgagaaggaaatataaactctgccaggagaggttatatcatggaaatagccttgaaattagaattaggtgatttgttattggggcctaattctggtatttcctaaccttgtatcattggataagatctttcatcacactaaacctctgttctaatttgtaaattgatgataataatatctaggttacaaggttactttaaagagtatgtgagataatatttgtgaaagcactgagccagagactaatcactaaatggtaattgatcacaaaattattagaaaaggcccaggcacgtacattggcacataaaacttgtaaaagttataatgtaacaacaaataaggattatttctacctatatggctaattttatagtgtatagatgggtgggatgctagttgcctaaacaccatttatctaccctttttctttttctaataggatcttaatattattggggatggcaaagtacttaactgaaattctacatttcacagtctcccttgcagatacaggtgacaaaatctaaaatgattgctattggtaggacttctggaaaatgttctgtagaaggggctgacaaaactgggacacgtacctgtttttccctaactccctttctcctttctgctgcctggaatacagatgtgatgactagaactacagtgaaaatgtgatggttatggtcatgtgatgttgatggaagccagtgttaagtatggtgaagctgagagatcgacaaacaaataagcaaaaatccttgggtttctgaaaatcattgcttgatgtacccctgggtttattttacatgacagagaaataaacctgcatcttgtttaagctaccatgatttgtgttttctgttatttgtagccaaaaatgatccaaattgatttgagtttcttctgaaacacatacacacaaaagtgaattgagggtgtttttattatttaatatctttttaaaaaaatataacagatcaaatggatttcagacagaaggaggaatacttggctgcattgtaaagaaaatggttattctagtttatgtgaaaataatttttagtacacatttgcactccaacaattagtgtgcacctcttcttccctgtttacattgctgctcatattttctctttgtttaatatttccattttctccattgacactctttttcccaaacagttgctagaaactcaaagttggctgtgtctttcctctgattgatctgtcagggtagtggactcccagtggaattgcaaatttataacaacagcttctccagaccttttctgttcagcttatggtttcctatggctattggagactgtgaggctacaaaataatggggcattgtgcacgggactgcagtagaagttacacaagagcttacgtgtctttaccatgtccatcctttcccatcgaacaaggggaggacagctgtttcttggtgtgttaaaattgtcttctaaaactataaatttattatgcttctgtgatctcgtgatccagaaaccatccctgttactgttttctccacacttcagtcaatgtagagagatgattattcaaggcctgatatattttaaagagattgaatgagtttccttgtcactatttactgagtatctacttcatcccaagctctgtgatgtgtaattatgcagcatagtttggataatgtactttggggcttgcaaagcttactgtccttttatggactcatcttttcacatctcttcaagtcttatctgtttcatgcattgtatctgttttatttagagtcagctgttactaaaaaaataaaatgaatgaaacaactgatctggaggaaacaaacacaatacatgaaatagataagacttgaagaaatgtgaaaggatagtgattccaaaaaagaatagtagagattaaaaagaatttttgaaaatgaaaagctaaaaatcccctaaacttccttatcaaactaaaaaacttaggaaatggataaataacaaggcaaaacactgtagtgtaagaattagtcatctggaagatagaattgaggaatatcttccccaacaaaatggagaagaaatatattagaaaagtgagagttaaatgatagctcaacaaaatctaatttcaatctgagaacaaaaagagagagaaaaataaggagaagagaaactcaaggaattaacagaagaaaaattattggaaccaaagcaatatttaaatcttcaaattaaaatagcccccatgtaactttgaagaacaatgaaaagttatagaaatatccagatgaaatgtataaattccagggataaaaggaagaccctaaacatgttcccttacaggaagaaaaagtttttatgtgccagtttctctgacctgtctctatggtactcgttaattggccattggacctatatatctcatttcttttcattcataatttccatttttatttttctctatgtgctttgaaatttcctcaactttatcttcaagttcttctattatttctatgttttaaaatcctaagcatttttattgctcttcatttcttcatagcattttgttcttattttatgaatgaactatctgtcattataaattcaaatgttgctgctgataaattctcctttgttcttggagtaacatctcagcttcccgggttggactttctgtgtatttgtctttgtagtccttatttgtgatgttgattttatgtctattcattgagagaatgaaagtctagatttatgattccaggctgtggatgtaagtttcctgctacataggtagatctgtttccaatgtacctcttccatgagtggcaaggctgcaagggactacagtcattccccaatgtctgtgggggattggttccaagacttcctgtggacactgtaatctacttatgctcaagaccatatataaatggtttagtatttgcatataacctctgcaaaccctcctgtatatgttaaataatgtccagattacttataatactgaataccatgtaaatgctatataaatagttgttttactgaattgtttagggaataatgacaaggaaaaaagtctacatatgttcagtctagatgcaagctttttggaacattttccatctgtggtgggttaaatccacagatgtggaacccatagataccaagggctgcctgtattatgtacatctatatagtgcgtcaacagtgtggttctatcgtgacatgagcgggtgggataagccacctctcaagcccccagtaacccaaatggcagagtaagtgtgttaagggatttttttttcactggagcaccaacattcataataaaagctcaagttcttcccatatgatccattcaatttctatagagaacctcccccaaccccacctttttttggtgctgaacattggatctcctatctttgacaggtgacaatattttcagctttacatgtacagaatcatgttcccttgataggatggtttctatttccacaacagttacctcatagcctgttctgcgtagcttgcttcctttctaattttttaattgtggtaaaatacatataacataaaatttactatatcaactatttttaagtatatagttcagtaatgtaaggtacatccatattgttatgcaaccaactttcaaaactttttcatcttggaaaactgaaactctacacccattaaacagcaacttctcattccccctccctgagcccttgacaagcactattctactttctgtttctatgaaattgactacactacatgcctaatataagtagaatcacacagtattgtgtgtgtgtgtgtgtgtgtgtgtgactggcttatttcattcagcatatgtcctcaaggtttgtcctgtcatagcatgtgtcagacttttcttcgttttttaatgctgaataatattctgttgtttgtatgttccacattttgtttatccattcattagtaaatgggcatttgggttacttcctatttttggctattataaataatgctgctatggacatgggtgtgcaaatatcacttcaagaccctgctttcaattcttttcaatttacagaagtgtaaatactggatcatatagtaattctatttttatttttttgagaaactgccatacagttttccataatggttgcacaattttacattcccaccaacagtgcgcaaggcctccagttccccagatcctcatcaacaattgttttctcattttaaaatatatgtgtataatataatacaattatattttatatatgtaatatatatacaatatatattatatagtagcaattctcatgggtataaggtgatatctccttgtggctttgatttgtatttccctagtgattagtgatgttgagtatcctttcacatgtttgttggctgtttgtgtaccatctttaggtaaatagctattcaagatcttttcacatttaaaaaatcagattgttttgggttttgttatttgttcattttgggatttttattggtttttttggaggtagtcagttacaagagttctttatatattctgcatattaaccccttatctgatatatgatttgcaaattttctgcagaatggatattttctcccattctataggttgccttttcattctactgattatgtcctttgatgcagacattttaaattttgatgtagcccaatttatctatttttacttttcctacatgtgcttttggtatcttatgcaagaagtcactgccaaatgcaatgttataacattttcctactgtgattttttctaagagtttcagagtttgaagtcttacatttaggtctttaatccattattcataaactcctgtagatgatataagggtcaaatttcattattttgtatgttgatattcatttttcttatgattatttgttgaaggctgtcctttctccactgaatgtttttggatagactttgaaaagattattctcagtgaaagaagtcagctacaagagaccacctattatgtgatttcatttatatgagatgtctagaataggaaaatatataaggacagaaagtagattaatggttgtgaaggtctggggagggaataaatggatttactgctaattagatgatgctaattgtgtagtgattatacaattcagtgaatatattaaaacatttgaactttacactctaaatcagagtatgtgaaaaaatttacatacctgtgaattatatcttaataaatgtgttaaaaagaaaggataccaaaatctatgcatcctgtggaactcatgtatatgagttttgtattccatcctgtggaactcatgtatatgaaaagtaggcctttcatataaacaggctttagattacataattaccatattttggatcctcatttggttgaaaaaaatccacttataaatgaacttgtgcagtccaaacctatgttgttcaagggtcaactgtatatacatacgatagaacattattcagctttaaaaagaaagaaatcttaccatttgtgataatattgatattttttgaaaacgttatgctaagttaaataagcctatcacagaaggataaatactgcatgattccacttataaggcatcaaaaaaatcaaacttatagaagtaaaaaattgaatggtggctgacagaggatgggagaggtggaaatggggagttgttcaataggtataaatttatagtagtgcctataattaacaatatcgtattatgcatttataaaagcaaatggtcacaagaaaacttttggaggtgatgaatatgtttattaccttgattgtagtgatattatcataagtgtattcatatgttcaaactcatcaaattgtttatgttaaatatgtgcaattttctatatatatcagttatgcctcaataaagctgggggaaaatcgagtaaaaaaatataaatgacacatatagagaaaatgtaaaatggtgataaaatccaagtatgtaatgataatattaaatgtaaatggattcaacttccaatcaaaggcagatatttagactggattaaaaaataataaacaggatccaactgtatgctatctgtaagaagcacactgtagattaaaaatagcttaaaagtaaaatgaaaaaagttacattattcaaacaacaactataagatacatggagtgaatgattgttagcctggtaatttatatcagataaaatagataataaaacaaaaatgttcctagaaataaagagggacactggtatggtttggctgtgtctccacccaaatctcatcttgaattgtacttctataattcccatgtactgtgggagggacccagtgggaaataatttgaatcatgggggcggtttcccccatactgttctcatggtagtgaataagtctcacgagatctgatggttttatcaggggtttctgcttttgcatctgcctcattttctcttgctgccaccatgtaaaaagtgccttttgcctcccgccataattctgaggccttcccagccatgtggaactgtaagtccaattaaacctctttttcttcccagtcttgggtatgtctttatcagcagcatgaaaacagactaatacagacacattacaatgatacaagggtaattcatcttgaagatataacaattacgtacatttatgcatctaacaacagggcccccaaatacataaagcaaaaactgacagaactgaaggaaaaaataggcaattcaacagtaacagctggagatttcaataacccactttcaataatggacagaacaagtaagcaaaagatcaacagagtataaacaatttgaataacattgtaactagacccaacagatatctgtagaacactctacttaaatgcagcagaatacatagtcttctagagcacatgtggaacattctctacaatagaccatgtgatcagccataaaacagatatcaatagattgaagattagaatcataccaaatacattttctgaccacacaggaattaaattagaaatcaataagagaaggaaattcaggaaatgtacacatatatgaaaattaaacaacacacccctaaataactaatgtgtcaaagaagaaaatccaagataaattttaaaaattgacataaataaaaacaaaacctcaatataccaaaatgtatggtatacagttaagaggaactcagatggaaagttatgggtataaatgcaaatattttaaaaagtcaataacttcatcttccaccttaagaaactagaaaaagaagaacaaattaaacccagagctagcaaaaaaggaaacaataaagactagagaacaattagacaacagaaaaaaaaatggaaaaaaaattaattctttcaaaagatcaacaaatttaacaaatctttctttagaccgacaaataaataagagaagactcaaattactaaagtcaggaataagaggggacacaacactactgaccttacagaaataaaaaggattgtcaagaaatctataggcaattctatgccaacaaattaagtaattgagatcaaatggacaaatttttagaaagatacaaactatcaaaactgactgaagaagaaatagaaaatctgaatttatgtataaaaagttggattattaaatttaaaaaacactttctacaaaaaaaatccaaattcaccagttggcatcactggggaattctactaagcatccaaagaataaaaaccaatacttcacaagctttttcaaaatatagaagaaatgggagcactttccaactcataaggccactattaccctgatattaaagccagacaaagatattacaagaaaagaaaactgtaacttaatatttcttatgaagataaatacagaaaatcctcaaccaaatactggcaagcgaaatccaacaatatataaaatgcattatacaccatgacaaagaaggatttctcctaggaatgcaaggtaatggttgcatctgaaaaccaactaatatgcacattatattaatagaataagggacaaaaatcacatgatcatctcaatagatgtaaaaacgaaatctgacacaaggcaaaacttattcatgattaaaaaaaaactcaaagaactaaagttaaaatggaactatctagccttacaaagggtgtctacaaaaaccccatagattatattatatttgatggtgaatgactaaatgttttcccccaagatcagaacagaacaaggacatttattcttaccatgtctattaacatcatattggaatttctagctaggttaattaggaaagagaaaaaaaaggcatccaaattgaaaaagaatgtctatttgcagttgacatgattttgtacacagaaaatcatatggaattgactaaaatactattagaactcataagtgagttcagcagagtttcaggatgcaatattaatacacaaaaatcaattttatttctttagtaatgaagaatccaaaattaatattaagaaaacaattccatttatgatattgaaatattatagcattgaatgaaatacaattttttcaatgctgtaatgttcaaaagaaatagatctggcaaaagattaaaaacttgtgtgctgaaaattacaaaatatagctgaaaaattaaagaagagccaatgaaatgtaaagacatcttgtgttcacatattagaagacttaatatttttaagatggcaatattcattaaagtaattgagagactgaatacaacaatcctaataggctttcttataaaagagagaatcccagtttgcttttcccaaaaattgacaaactgattgtaaaattcaaatggaaatgcaagaaatctagaatagccaaactaatcctagaaaaacaaaattgaaggtctcaaaattccaaatttcaaaacaaagccatagcaattgagacagcatgtactagcttaaggatatctctctctctctctctctctctctctctctctatcatctatctgtctgtctgtcttatctatctaaatggaatagaatcgagggtttacaaataaacccttattatttgtgctcaactgacttttaaacaaagatagcaaggcaattcaatgaaaaaagaacagtttttcaacgagcagtcatgggagaattgtatatccacatgtaaaaatcatgaggctgtgttcctacctcacaaaatatgaaaatttaactcaaaatcaatcatagacctaatctgagagtgtgaactataaattcttagaagaaggcttggaataaatatttgtggccttgattcaggcaatgattttttagatgtaacaccaaaaacacaaatgacaaaataaaaaataggttaattgtactttatcataattaaaatcttttgtgctgcaaataatacaatcaagaaagtgaaaagaccaccactgaatggaaaaaaaatttgcaagtcaaatttgtaaaaagagacatgtacctagcatatatggagagctcttacaattcaataatgaaaagtaagttaaaaataggtaaacaatttgaataggcattactaaaaataagatatacaaatgactaataaaaacataaaaagatgctcaacatcattagtcatcagaaaaatgcaaatcaaacccacaaagagatcccactttgaacccattagcatagctagaataagaaaagatagaaaataataggtgtcagaaagaatatagagagattgaaacgattatccattgctggtgggaatgtaatatggtgcagtcacgctttaaaacagtttggcatttcccagagttacgatataacccagcaattccattcctaagtatatgcttgagagaaaaaaaaatacttctatacaaaaacctatacacaagtgttcaaagcggtagtattcctggtagccagaatgtggaaataacccaattgtctatcaactgatgaacggataaacaaaatatggtatattcatataacgaaatatcattcatcaataaaaagtaatgaagtactgacatgacacaacatgaacatgaatcttgaaagcgttatgtaagctttcaagcttacgtaagcttgaagcccttcacaaaacaccatatattgtgtgattccattaatataaagaccgagaataggcaaatccatagagacagaaagtagattagttgttgccagaggctaggcgaaaaagatatggggagtgattgccagtggacatgttttttttttttttttaatatgaaatgttccaaaattgtattgtgctgatatttgcacaactctgtgaatatactaaaaacatttcattgtgtggtttaaattaatgaattttatagtatttaattacatctccaatctgcttaaaaaaagaaaatagatcgtggaggaataggatgagatcgagagagcagataaagtgtttaattcatggttagaagcaggcgtactttttccatagtaccaggtaaaaggcatctctgaggctaattttacattactcttttttttttcatgtgaagataatcattgttgattttaacttgatttaatttgtataaaaatatcctgcaagttctgcactatataatttgcccttaagccctgttcccttgagtgataacttctgctggtggtcatcagtgttttgaccatgatctggacacagtctcctagatgatcatattctttcctagttacaaacatatccctgcattggcttcattttattttccatccgccctttctgcctgaaataactttgagtcagtcctacccacagagtaggatgtcctgctgcgtggaccaatagaggagctgtcttctgtgcttggagctgcacctgtgctgttcccatcatctggtggttggaggtatatctgggtatacagcacagataccacatcttctagagttatgacgtcttgtacagttcctttctaatcagtaagcaagtatgaacacctgggatgacgttaggtcactctctgcctaatccttgcttatttaaagaaggcattttaaatattgcccagtcttcttttttaatacctttctgttttattcagatatcaggggtaaaatgctatgaaggaggaaagtaaaatttaaataaaaatttaacaaatattagtaagaggagaaaatgtcattagtcttccaaggaatatggaacctgaaaacaggaaagtaaaatgttgaacacttccaactcacagatgcctctgcatttacagctcactacaaaggagacatctcgagttttccacaggaaaacagatttactacgaggtagttagtaagtagaaacaactccttattcgactctttcttctaagaaaggtaatcagagggtagaaaagtgccactcagaaagcaaaatggaatggaccaattattctaaagataaaggtggtggttgtaagctgcttccaaacaagtgacaaacaagtgttgaaaatatgcctaccatatgatctaaccattccactccatgacatttatccaagggaaaggaaagcctatatttatacagacgttttaaaataaatgttcagagcaggtttatttgtgattacgaaaaattggaaacaacacaagtgtccatcaagaggtgaataggtacacaaatcttagtatatccatacaatgtaatcctacagaaataaaagggaatgaactactgagacacataacacacgtataaagctcaaagtaaaagaaaccaaacaagagtatatatcatatgatggtggaaggacaggatggaaagattgcaaaatggcacaaggaaacttctgagagtaatgtgtgtgttcaccatgttgattgtactgatagttttacaaatacagtcatgtgccacataataacttttggtcaatgacagactacatatatgacatctgtctcataagattataatggagccaaaaaatttctattgcacaaatacttaccattatgttactatttccttacactagttagtgcagtaacatgctatacaggtttgtagccaatgagcaacaggctataatatatagcataggtgcgtagtaggctataccatctaggtttatgtaagtatgttcacacagtgatgaaattgcctaaggatgcttttctcagaatgtatccttgttgttaaatgatgtgtgactatatgtatatatatcaaaacttttcaattgcatatttaaaatatgggtaacttactgtgtgtcaattatacctcaacaaagctgtataaaaataatgaatcacgtgccctggagtggtggaatctagttgctctctttacaagcttaagctcattaccgtaataactgactattaatgaaatcaatatgcatgtgaaagaaacagaaaggggcaacaacttggtgaagccaccactgtaaaatagcaattatttggtctttggctcattttttgacttttgtgtccagaagcaatgagcagcctataaccaacttcatttgaacaaacagtaaacagattcatgtccactgggatattgtcttccaggatccccagacctgctttcaccaaacatgaaatgtctgtttacaaaattctgctctgttagatggaactcttatttctctccctgcaaaaaggccagatatttaaaatatctctggaaaataggaaaaataaatatttgagtaaaattgtatttcatctttaaactgctatttcaaatatcaggagaacttgttacgtccttttgtacaaaagggagtggggaagctgggacatgtaacctgaggttgaacctccaaagcacacactgtatcaatttatagctcattggtatgactaattgagagctgatagtgaaaaaacagtatatgtttgtgtatgtgtgtgcatatagaaaatctacagctagcagcaatatgttatacatatacacatattgctgttagttgtaggatagactttttaaagagcagtttcaggtacacagcaaaactgaggggaagctatagagatttctcatatatcccctgcccccacacttgcacggtttcctccattaccaacattcccaccagtgtagtatatttattacattgacacattataatcacccaaagtccatagtttatattagggttgacttttggtattgtggattctatgggtttggacagatgtataatgacatgtatccaccattgtagtggatacatatggagtattttcactgccctaaaaatctgtactctgcctattcatccctctccccaccccccaccctctagcaactactgatctttttactgtttgcttagttttgcctttttcagaatgtcatgtagttagaatcatgcagtatgttgtcttaatattggcttctttcacttattaatatgcatgtaagtttcctccatgtcttttcatggcttcgtagctcatttttctttagcgccaaatgatagtctgttgtctgtatttaccatagtttatttatccattcacctactgaaggatatcttgattgtttccaaaaccaatgttttgacaattatgaataaagcttctataaacatatgtgtgcatagacataagttttcaactcctgtaagtagacaataaggagcatgattgctggatcatatagtaagagtatgtttagttttgtaagaaactgccaaactatcttccatagtggctgtaccatttttcattcccaccagaagtgaatgggaattcctgctgctacatgccgttactggcatttagtgttagtgttctggattttggctattctaatgagtgttcagtcatatcttatttttatttgcattttcctgatgacatatgatacagaggatttttttcatattcctatttgccatctgtatatcttctttggtgaggtgtttggtaaggtctttggctcattttttaattgttgttttcttattgttgagtttaaggagttctttgtatattttggtctactgtcatttatcatatgtgtcttttacaaatatttcctcccagtttgtggcttgttttctcattcttctaacattgtcttttcagagcagtaggtatccattttaattaaatttagcttatcaattattccttcatggatcatgcctttgatgttctatcaaaaggtcatctccatatgcaagatcatttagattttatcctatgttatcttctacttttatatttttgtgttttgcattgaggtctatgatgcattttgagttaattttgtgaagggtgtaaggcctgtatatagattcatatgtgttttgcacatggatgtctagttatgtcagcagcatttgttgaaaagactgtctttcctccatcttattgtctctgcccctttgtcaaagatcaattgactatatttatgtgggtctatttcttggatctctattgtgttctactgatctatttggctattctttcaacaatatctcactgtcttgattactgcagctttctagtaagtcttgaagttgggtaatgtcagtcctccagctttgctcttcttcagtattgtgttggctattctgggtcttttgcctgtctgtataaactttagattgaggttttcctattcatgaacatggaatatctctccagttatatagttctttgattttattttccatcagcgtttgtagttttcctcatgtagatcttacacatattttattaaatttgtatgtcagtattttatttattgggatgctaatgtaagtggtattatgtttttaatttaaaattccacttgttaattgctggtatttaggaaagcaattggcttttgtatattaaccttgtatcctgcaactttgctataatcacttattagttttaaaatttatattttgattcttttggattttctacatagaacaataatgccatttgtgaacaaagatagttttatttcttccttcccaactggtacacttcttatttccttattttgtccttctgcattagggagaacttccagtacaacattgaaaaggagtggtgagaggggatatccttgtcttgttcctgatcttagtggtaaagtttctagtatcttaacattaaatttaatgttggctgtaaggtttttttgtggatattctttatcaagttgaggaagttcccacttttcctagtttactgagagattttatcataaattggtattgaattttgtcaaatgccatttctgtggctatttatataatcatgtgattttttagcctattgatgtgatggattatattagctgatttttgaatgttcaaccagcttgcacacatgaaataattcccacttggtcgttgtgtataattctcattatacattattggatttcacttggtaatattttgtttaggatttttccatctatgttcataagagttatcagcctatagttttcttttcttgtaatatttgtctggttttggtgttaagataatggtggcttcatagaatgaggaagttttctctctgcttataatcttctgaaagagattgtagagtattggtataattccttccttaaatatttgctagtatgtatacatctttaattttactgttcattcgaatcatgtcatctatttgaatagttcaatattatttagggagaggctaaatcaataatagttaaataggtggactatggtttagtagcaggtgtttcatgagggcccttcagcctgtgggcatgatcaggtcacagggtattatattttccctgtgggctcatcatggccgggcactcctaatcactgctaccaagcttactaacaataacaaaaaggaacgctctatcctgttataagtgctgttacatggctttatcttattgagcaagtgtctctaggctaatcactggactgtggtcaccttagaacaactctctggtgaatgctgtgatgttcacccaaatctccattcaggaattgagaacttattccccatctgtggaaaggctacggaagatgccccttaggtcagatctcctgccaaggacagcctgcacccagtcactgatcactgtggggacataaaggcccgggcccatcaccccaactaaagggctacttaagctcctgagatccccaaaggctgagacctctgttggaacctcatggcagctcaatttctgtttctgcccaatcctgctttcttttcttctgcagatatggatcccaggagctatccaaaggtttcctggggtagaatcaaatcactgatccttgtttttaaagcgcccccttttaaaatagccttggattgttagtgatgctgttgtggctacaggctcggaagtcaagctttctgggtttacctcctggttctctcatctctttactacagcaccttaggcaagtaacttaatctcactgtcagtttactcagctataaaatggatataatatttgcaccaacctcatgatatatatcccagatacactctgactctgagttgtttagtgtattagggaggaaattgacatccaggacagttaaactctaatgggtggaggaaagataaagagaaaacaatataaagcgtggcatgctgactaaggactgaggactaagactagggcccctccttgtgaccttctcaatagagaaaatgtaacggaaacatagttacagtaaaggtcaggaagaaaaatggatggggaaaattaataaatgatatctatgataagtcaattatttattatactccatccacttccaaaaataagtggatgtaacttataaatttgaatacaacatatggcaaagacaacttttttctaaagaggaaaaaattgctagaattaaaagtataggcatttcaggtacctggaatgaaaagctccttttatctcatctgaataacaaagtataaccatttgtctggaagaaaaatatcatgggtgttacttcacatcttaaatatgttccaaaaactcacagtggaaatattgtttggatgtttgtatttactttccattaaaaccaacagcataacattacatttattctttaaaggaatttttatgtgaatcttagcaaatatggtccatttacgttgcttaggcttacactgctaactaagggataatgtttagagactacagagcagtgattctcaaccctggctgtacctaagaatcaccagggaagctttaaaaatcatgatacccacaccacatcctagaccagttaaatcatggtctctgctggaagcccaggcattttttttaaagcttcctaggtgatttcaatgtacagtcaaagttgaaaactgctaacataacagactgagcagttactgtctccattagcctatcctgtttatgtatcattatttctcagtggaacttttgattaatgctgggttgcaatcaaatattatgccagtatgcatctaaagtactagccttatggaacattgattagataaggaagtcagcagagtggacccaggagtgactaaggtcctcctgggaccaataggatgtgagtaagttagtgggggattgagttattaactctagattgacaaagaagtcaaccaattgcttgtgcttttcaagggtcaaagactatgacctagttactttcctcagtagtttgcttcagaactccaggttggtaaagggtgaaaaaaaatccatgggcttgttgcccttaaatatctggaaacactagactgattcaagagatgctctgggttccagcagtgcaactccctaaaatgattggagacttggttgaagttcccaggaattaacatgaaatgcgacttcatgaatcgaaatgtgtttgtaaatgacttgtaaataatagtttcattcttcaccagtgtaaggtgatggccttacatcttatcataagatctaagccccaaatggaattgcaaatctttccaaggactttcattcttttccctttggaggagagagctctgaaaggcttatagctctgcccccttatggccaggcctttctgagtcactttaggtctcatggttcaccttggctacaagccattactctttttgccccatattatttggggtgatgcatgggaaagctcagatgaaaaacagactgcagttttgatgtttttgccccttctatccctgagactttgagcaggttacccaacttctctgaaaccatttcctaatatttgatgtgggaataataatctatcattgaaatgcttaatatgttactatatattcaagacattatatttgaaaaaaattgataaaatgttcagcaagcataattaagggaaagagaatggtgctgtcaaatagtattattagagtttttaaagtctatgttctacccaatatttgacagtgtttagtaaagtatgcacagatgggaggcccttaccagccccactgattataggagaaaaggatgattattttccagagctgctctgtgcaatatgaaagtcactgttcaattgaaacgtgacttgtctaaattacaatgtgctgtagataaatacaaaacggatgtcaaagactcagtgttaaaataagaatgtaaagtatctcttaacaattttgttctagttatgtaatttattttggacatattgggttgataaaatatgctgttaacatcaatattacctatctcttactttttgtttaaaaatagaaaattttaaaaatagaaaatttgaaatcatatatttggctcacatttgtggcctgagttttatttttattggggagtgctaccctagagctttgtgttggctcaacacaatttaaggggaaaaacattaaacctcccaataattactttctctggaaatcactgtgcctcttgattttttgtgcatttaccctgatgacaccatgatgttagatcctgctctcatgatccttctatcttagaactgtgttggtttggagcttcagaaattaaacattcttgaataaagaatgggtctttcactaaataaaattcctgcttattgtgaaaaatatcattgccagttttttgtgttttttttttgtttgtttgtttgtttgtttttttttacacagggcagattcttttctccttcaattttttatccctcttttacttaagccaccctttaaagaccctcaattgctgtctgatcatttaagttattacctataactcctggagctttggtctataccaaatcactgtggcctgtggggtctggagcatgaaggaacaaaggtctagggcaattcgtgcctatgtgactgacccccaaggaaagcactgagcaccaaggctcaggtgaacgtcccgggttggcaacactttacaagtgttgccacacatcattgctgggagaattgagtgttgtttatatgactccactgggggaggactactggaatcttgttcctggtgtctcctgggctcctccctatgtgtctttttcctttgctgattttaatctacattatttcaccataataaactgtgactgtcagcataacagctcaggaatcctgagggtgatcctggggaaccctgatgtacattaaccccgaattgtattcactgtctactacatactgacaatattactgataaaagggaaacagacaggagtagggggatggggatagaccctaaaatctgtgggctgtttattgtgagctaggaactattttatatgcttttcatgcagctattatcagatggcattcatgcaataactctctcatgttggttttatagacaggaaaatggagtttccatctctaacccctaataggtcaaattaatacagtatggcctaaagctgtaggcatataaaaaccattcaccataactgaatggtagaaccagatacaagctgggttctctgagatcccaagctctggttccagcataccacagcaaagatgtagctacaccatggccatgacatgtgcagcagaggctgtgggttctctgcccacaccagaattcactgcagagtttctggacatgcctatgacctgctgcatttctcagcctgacaactctctctgataggttgagcatgcttgtccagcacaccagacgtgatacctgaggaatggccctcaaacaataagaaatgtaattggtgaataaatacctgattttctttgctcctcattgggtcaattctgaggcatgttccacagagtgtcccacataatccccaatgaaattgagccctagttgtgttaccagtagagggtcttgactgcaagttgtccaggttcttgcattttgaacaaagaattggacaaaatgcacagcaaagtaaggaaagaacgaagcaatgaaagagcagagatttattgaaaatgaaagtatactcttcagtgtgggacccggcttgagcagcagctcaagggccccagatacagaatcttctcgggttcaaatacaccctagaagtttcccattggccacttggtgttcacctcatataaatgttcaccttcacataaatgaagtggtggccccctattggttgcttactgcaaccaatcagaggctggagtgaagttacaaaggtcacacacctatacaaacatctggctagttgtggacagcaaccaatcagaagctgaagtgaagttacaaagttacagtcttatgcaaacgtctgtttgcgtctggttgcaaaaagcaaccaatcagaggtactttcaatttcctatctgcccatgaggaacaggtgggagtttgcaaagggtttgcctctggtccttttgctacttaggcatggaaagttagggttttactttcagtttagtcctaggaagtcagcatgaaacggccttaggttccctgcctccagaccctgttctgcggactcagttgctcacagcagcgtgcccctctgtgacatgccctttactggcattattccttatctatctcacctccccatgccttcactatgtgacctgctgttccctcccaaatatacgacttgaagccaaattccaaactcagtatttatattcggtagaaacccacatgaagaaaagttataggatcatacccaaatagctagatataaagcagaaaacaaagggactgaaggacagtagcaccatggttacaccctgcattctgtatttttaagtctcaccttcataacgtacaaacatttctttgtcccatatttgacttaagttgaatcattacattcaattctagcatgaaatatgtatatacaataagttgtcatacattgttctatattatagtatgttctttgtactttagtttatttggttaattcttgttttccacccttaatgccattaaagtatgtacctagatgaaccatcattcgtaaagctgaaaggtaatatttacttaatcaaaattagacttcttaatactcgttaaagggaaaacccattgtggggaagaagcatagagtataatgctcatattatatttcagacaataaaacaaccttgtataatcctattatgaacattagcatacatttcacagcccatccggcaaacaataagggtcatgactctatgtatttgaaatgctatccagggcattgtagtaagcaaaatggtaaaacctacagctgtgtcagtgggtcaaaaagcggtcatggtacatttctcagacactgtgaacccaaatacgcttttataaagataagctgtgtgttaggaaacatgtttttcaaagctaaacaggtctaaagatatagttatgtgagaagcagggacgggagggggagagcatgacctgtttggagtgattcatggttaaatgaaactgtgacaaaactccagtgtcttgtggaatgcaaattcttattataaaaacatcctttatgagacagagaaaatacagtgtctgcttccagttaaagaattttcttctgaaacttcagaagaggtcactctaatcagtttgccggagaatttctaacctggaagattaaaagacaggatttttttcccccaaatcatatttggtaatagtaacttattttattgatacgttttagactaggtctaaaattttagatgaagtctcctgtgcatatttcatactcctgctttctggactgtcctggcctccttgatttctttctttcctctgtccctattactttctggatgaaatattaaattcacataagaattgaatataaaacataaaattatatctccaaagagtatgatatgtcatacgataggttctgactcagtttctatctgagctaaacctggaaaatagacgccgcctccattaaattgttattttattagagtgagcaagtgtctaaatacctataattattgttacaggtatagtctactgtttaaaaattatgggcatgttgacattatgatttaatcattcacaagctttataaatataaaagatttgtcactgtcactggaacctattttaaattatttcatgccttcagtttacttagcttgtatccaagtttgaaggcaatctcatttgtcacattgttttctctgacaataatgatgaaattgctgctaatttgaaaagaactttaaaattctgtattacgtctgacccagtgataatattcactgtatgccaacatggtaaatgcaacattgagtgtgaaattgataaatagccaagtcctcaaactactcctttctctgcaagtataatggacctaatgcatatatctaaatgacatgcatttttagtagaattcacaaataggaagtaccatttcttgccaaaacaccagaggataacaccctccctcctgatgccaatctctcaatatcttcttcttttagagaacttgggttatgaatgtagagaccactatcctgacagcacaaggaactacagtctgtcacaaacagagagatgcacacctcgctaaacctaatgctggcagcaggaattcatagaatatcagagaaagcaaaaggctctttatcacaccacagatgatttcactctttttaatgcaaattttgaaaaactacataggaaacagaattttctacaacttaaattggatcctattgcaagaaagtgaccagtccatagcagagctatatgaaatacacagaaaaaaagtgagcaaaacctaagacactacgagaagaaaaacacttattgcattagaagagaaactgtgttctagactcatctggcaaataatttttgttaatttagtaataatgaggacacttagttaagatattgccatgacaagtagaagttttaatttaatagaatgtgtaatcgctcacatctgaggttctaattagcacatggttcttctcaacacagggaatgggaacctaggctccctccagtgtgtggttctgtcatcccatagggtagtttatggaaatggcaaagacagcatggaggatgcacagccgtttctaacaagtggcttagaaatgtcactcatcactgccacttacttcccattggtgagaattcatctcataggcagacccacctgcaagaagtgtgcagaagaatgaatgtggcctgtgattgggcagccacttccttgttacaactgtgttctatggaaaaggagaaaagtttgtggtggatagatagccattgctgcaggaggaattggaaatagcagaattccatctcaagtatctgtagtattcactgccagatagatagatagatagatagatagatagatagatagatagatagatagataaactttccaaatagatctttgcccattaatgttttatccatccttcaaggctcagttttaagtgttgctttttctaaagagtcatccctagctctcatcaagtacgtcccacactgcctattagagaataatgaatggcatagatgctgtcggttctcaacttagattaccttaccaggctggtgcaatccttccctagctgcatgaatgttggctgctaatggctcagagctgctctcttctatggtaaattgccaaatagaagacaccttaccttggaggtcaaatgactttccctcaccctgcagtcgacagccaatgactgatcaacatgtgggtaagagagaccattcccacagtgagatcaagtctgtggtgcagttcatactttggagttcccaatgagattaggctgaggctaagtctggctcaactccttcccttgccccatcctgcttctcccattcctcttctcttgacagcgtcctcctcatgcccctgcaataaaccacatgcactggaatccatgttttaggttctgctttcagggagttaagcataaggccaggagccacctttcttctaaagttgggagactgtatgtaatcttcatgtatttctttctatcttaatttcatgttttaggggtgacgcaaaccttaggaaaacaggttcacaactgtaatttgatcagaaaatcaaattccagggtttccccacgctcggtaaatgttctcaattttccaaattctccacattttatgacttttcattgagaattgagtgtagatactgatctagcagccatttgtgattctccattatcagaggtagatttttcaagattctctacatactaagcaggaagattagcacaaatattttatgtttacaaacattaaggaagttccctttagccaaaaaacatatgaaccaaccgtaataccctaccctataagcagttgcacaatgtgatctgaggataaaataaaatgttaatgatgcagtgctttatgtctatgacatagtaaaagccataaatgtctgttcttgtttcacttcattttcattctaacatattcccgccattgtctctttgtaaccccaggtgagacaggaaggaagagccataactggttcaatttttcaaaagtgagatttaaaacatcagaatcagcttcaaattatgagtctcacagcaacaatttgggatgtcattgatttggtatgaatgtccccttaatgtgctatagaagtccctaggtacaggcagcaagggaaatcccacttggttttcataatgttcatacttgacttatgacaggcagaacattttagattccgcaatgaattaatgcttaattaatatatttaataagaatgagacatgatatcactattgtgttccagttaattcctgttatcatctacatgaaaatgtttcttgagtgaaacatttaggaacacatttcagaattcccatgatagtaaaagataatgaggctttgcctctgatgaggacagaatcttgacagttttctaattaatgggataaatgtggtagctcagcttctcttgcattcaaatgtccacatcatctctccattaataggcaaatggtttctctctcctaatcaaattatactattctttggcgtctttatcttaaactatttcttacttgaaataacttgactccttcattttgcaaatatgcatacttttctgtctttgaaaccaatccttcactgtgaaacttttttctaaaaactctaggctgtaattatctgatgttctgactactaccagattgtggcttggttgtacagtttgttactgagttatgttcaaattatcacttaatttctgtcataagttgacaagtttgtctaagtcataacctttgacagcatagttcacagggaatcgatcagatcttatatgctgcagtgtaatattcactgtgcttagcccacagctgaacatacagtaggttatcaatatacagttgaatgtgagaatgtatgcacatctcatattccttggcaccatcactactgggtctctgagatgaaagagggtcagaaatgtcataggcctcttcagctcactttcttgacccaacatgacccaaaggtgttgtatcatcaagtgtgagaaggaattcactcccttgcccacttctcccaacacttccttcccagagacagctttagacattgttggcaagagattgtctataagcaggtcagaagaaagggtcactcctgtcttaggaaaggtctgtggtatcttcccctcaacaaggagcaagaccccattaagtgtcaattgaagcacagataatgtatgagtattaaagaatagactcagagtcatatgttgttccatagggaaaatgcatatactttatatatttctctcatggttatttcctaaggaagcaactataaagtacacacatatacatactagaaactgcatacttctcaggtgataactatatatttgtatcacttttatgtatttctctcatggttatttcctaagtaggcaactataaagtgtgcacatacacatactagaaattgcatacttctcagatgattaatatatatttgtgttactttagacatttgacagacatttggggtttacgcaaggtagtgatgaaaactaggagagaagtatctgcttccctttagtctgcgctgtggagttctgtgagtcatgttccatagacttacacatcactccagaaacatgcttcattctgccatgtttcatgtgtcatcctgcttgtgagtgcaaccttgatcttcagcttctcagtgcaaaagacagggaagaagctaccagaacacaggccccggtgtcactttccagatttcactagctgagtgaattttgaaatgttatttgatatttccccattagtacaatcaagttaatagtatcaccatgtcagaattgttttaagaattaaatgatgtacaaaccacctagcacagtacttgtccaaacaatctattaattcagcttttcattcaacaaatgtttattgtgtacctactatgtaccagtttacactccagaagaaaaaagactattttaataaagcatatagtatgttctatggcaaagacaaaagctgcaaggtggaatatggggaattctgaaatggtattttgtttgtagaccccactgataatgtaaatttgataaaagacctgaagggggtaggggagttagccatgtacaaaggtggggtgtcttagtcagtttgggctgctataacaaaaacatcatagactaggtagttcaaacaacaattcatttctcacagttttagaggctgcaaagtccaagatcaaggtattggtagattcagtgtttggtttgcgaatttccgtcttcttattgtaactgcacatggtggaaagcagagagacacagagagagaaacagaaagagagagagagagagagagagcaagttattgtgtctctttttgtaagggtgctggtcccattcatgagggctccacactcttaacctaattagctctccatgatcttatctcctcctgccatcacattggggatcagaataacaacaaatacattttgggggacataaacagtctgcccacaaaatgggggaagtaagtttcaggtagaggaaacagcaaatgcaaaggcccaggggttgggaacacatctaatgagttttaagaataccccgaaggccagaatggctagagtgggttatgaggaggagaagagaaggtgaggtgagcaaggtgatagaaagcttgatcaagtggagtcctgtaggctgttaaaattgttgtggcttttattctggtgaaatgaaaaaccagcggagcattttgagcagttgattgatttgacagcatcactggggctggtgattgagaaaagtgaaaggaggccagaaccccaatttgcaggctactgcaataacacaggaaaaagaggatggtggctagtactgggatggtatcactgaagttagtgagaagtgattagattctgaataataatgataaacaatttgagttaaaaaatccaagatatgtaaatcataatttgattttgataatagcaatgtttatttgatatagcaagagttcttgatattaaaacaatgcttttgacaaaataatgctgaaagtacctattctatgttcacaattctactggaaatgccatgaatatgaatattatgcatatggaacaccaaatatcagcattaaattctttggcaatatatttttgtctttcctagcatatctcaaaaatcaagatgaatccttaagctttctacccagatgttgtgggaacttgaagacaaagtctcaaaggtaaagtagatagattttattgaaagctttttctgtgtctgttgagatgatcctatggtttttgcttttaattctgcttatgtggtgaatcatatttattgatttgcatatgttgaatccaccttgcatcccagtaataatgcctacatgatcatggtgaatcaactgtttaatgtgctgctgaatttgatttgctagtatttcattgagaattctcgtatctatgttcatcagggatattggcctgaagttttctttcatcgtcatgtctgccagattttggtatcaggctgatgctgacttcatacaatgagttagggaagagtccatcctcctggaattttttttttttaaatagttttagtagaattgataccagtatttctcttatgtctggtagaatttggttctgaatccatctggtccaggcctttttttttgcattgctaggttctttactactgattcaatttcagagttcaatattgatccattcaaggtttcaatttctttctgattcaatcaagggagattgtatatttctaggaatttatccattttctgtatattttctaatttgtgtgcatagaattgtttataatattctctgattatcttttttatttctgtgcgatcaattataatgccatctttgtcatttctgattgtacttatttggatcttttttgttaatctagctagcagtctatcaatcttatttttcaagaactaactcttggtttcattgatcttttggatggattttttgcattgttaaaacccaatatctcatcatggtaaaaaacctcaacagactaggcactgaaggaacatatcttaaaataataagagccatctatgacaaatccacagccgacatcacactgaatggacaaaagctgaaaccatttccctcgataactgcaacaaatcaaagatattccactctcatcactcccattcaacatagtgttaccagagaaatcaggcaagagaaggaaataaaaggcattgaaatagaaaaagaagaagttaaactgtctgtctttattgagaatatgattctatacttagaaaaccctaaagacttcaccaagaggctgttagaacttacaaatgattttaacaaggtttcaggatacaaaatcagtgtacaaaaatcagtagcacttctatataccaataatgtctgggctgagagtcaaagcaagaacacaatttcatttatgatagccacaaagaaaatgaaatacctaggaatacagttaaccaagaaggtgaaagacctgtgcaaggagaactacaaaccactgttgaaagaagtcagaaatgacacaaacaatggaaaaaataccatgctcattaattggaagaatcaatatcattaaaatggccatactgcccaaaacaatctacaattcaatgctgttcctatcaaactaccaacatcattcttcacagaattataaaaaaactattccaagaatcatatggaaccgacaaagagcccaaatagccaaagcaattctaagcaaaaaggacaaagttgggagacatcacattactcaacttcaaactatactgcaaggctacagtaacaaaaatagcacagtactggtacaaaaacagacacatagaccaatggaacagaatagaaaactcataaataaaggtgcacacttataaccatctgatctttgataaagccaacaataacaagcaatagggaaaggattccctattcaatagagggtggtgggtagccatattcagaagaatgaaactagatccttacttttcaccatatacaaaattaactaaagatggattaaagatttaattgtaagccctcaaactgtaaaaactctagaagaaaatttaggaaatactcttattgacattgaccttggcaaagaatgtatggctaagtccccaaaagcaattgccacaaaaacaaaaattgacaagtgggacaaactaaagagcttctgcacagcaaaagaaaccatcaacagagtaaacagacaacctatggaatggtagaaaatacttacgaactatgcctccagcgaaggtccaatatctagattctataagaaacttaaatcaatcaacaagcaaaaaacaaataaccccattaaacagtgggcaaaagacatgaacaaacacttttgaaaagaagacttacaaccggccaacaaatatgaaaaaaatgctcatcatcactaattatcagagatattcaaatcaaaaccacaatgaaataccatgtcacaccagtcagaatggctattattaaaaagtcaaaaacaagaaaaaaaacaaaaaatgaaaacaacagatgctgatgaagctgcagagaaagcacatatacgctgtaagtgggaatgtaaattagttcagtcactgtggaaagcaatttggggatttcccaaagaacttaaaacagggctaccatttgacccagaaatgccattaccaggtatataaccaaaggcatatagatgattatatcagaaagatgcatgcgttcatatgttcatcactattctactcataataccaaagacatggaataaacataggtgcccatcaatggtggactgagtaaagaaaatgtggtacagataccccatggaatactatataaccataaaaaagaataaaatcatgtcctttgtggcaatatggatagagctggaggccataatccttagtgaattaatggaggaacagaaaaccaaatgctgcatgttctcactcataagtgggagctaaacattgagctcacatgaacataaacatgaagaaaatagaccatgtggattactagagtggggagggacagaaggggttgtgggttgaaaaactacttattgagtactatgcttaccacctgggtcaaatatacccatgtgacaatcctacacatatatccccctgcatctaaaatgaaagctaaaatttaaaaaataaataaataatgccatcttggtacaagtgtgttacttaagtgtttaaaaagcattttcccttgcacttttgagtggttcaagaaaaacaccatattaaaacgtgtactttccaaaaaaaataaagtaggtagagctgagagaatttcagatatttttcttttagtcttagtggattcttataattaggaaaattgatataatgtatctactctgaacaccactgcttaagtagggagacaagaaaagactggccagttctagaagagcagagtgtctatacatagcaagaaggaggtctcctgtggcaattctttctcagtcttgaacattttgtggttgtacaaagaacacagttgaaagccaagagactgggttctattgctggctctgtcaccgaccagaggcactgccaaatatctgtaaattaactgcagaatttcttccaattttacctttctgtgacttgctgatcactttttcctagccctttcaacatctgtaaaactatagagaacttgtaaagcaagatatcttttgctgccagggtggttggagaagcattttagacaatcacggactctcttttggcaggtagattcaacacagcagctcataagacttgaaactcattatcactgttttcttacacaaagagaaaacacagctcttcagagtgatgacctgcaaaaggattttagttacttttgtttttagtttttaaaaaataaaaaaataagatgcatttctcatcggcaacacagggtgctagaggacagtgtggtaatatagtcaaagggctaaagaaagtaactgttaagcttggattttacatagtctgccactctcactcaaggtgacagtgaaacagagtaacattcataaaaaatccagcacccttgttgaacaaactgaaagatgaattctagtaagaaagataataccttatagacaaggaaataagatgcatgacacagttataaacacagaaactggtgaaatatattggtaaatccattgtacttagtaatatgaatgataatagtaataactgacttagtttgtgcttaaagcgaagtgaactgtgaaatatccatatacattttttaccttgctaggaggacagagatgttgattaactacagagcttgttaaaatatgtaaagctacctgtgcatgttaatgaacagactggctgtataatgcgcagcttccaaactagcatagagaaaactaaagaaattgtaaaactgaaggcatgaaatgagaacaaataggcaaacgaatcttagtaagtataaaaacataagatagctgaaataagcccatatatattagtaattaaaacaaatataaacagtttaaattcacctcctacaaggttctggattaattgactgaatttgtaaaacccaagctacttaagagacacattcaaaaaacaactaagaaaaattgaaaaaagtgaggcttagatattaacaagatggataatcatttttaaagattctgaaatataatttaatactaataatattagcattatttctttactccctgacctaacatttttactaaattctatgttacaactatatcttcttaaaatattctgtttgaattttacattttatatatatatatatatatatacacatacatacatatacataaacaaagagatctataattttttgttttgtttttcagaatatattcacacctttcatgttgcctcattctctatatcttcccataaagtagcaggtagagaccatcttcaacctatctattttcagttctgacacatacaattcatttttaacatttaaaaagtataaccttataacaaaaatctaaataattccctacttaaaacccttcaatggttttccattgcttttagaactgaaattctcactcaaatcctaaagtttctggataacttagttccttcttatctgatcaacttcttcaaatgttgtttccacctcattcactaatctctagccatgtgccattacctttcaatttcttgggcacagtagataaatgcttttacacctaaggcttctgcagccattgttttattaaattaaatgtcaactccttcaagaagacttccttttctaattctctgtctcagccacttgtgtcctttgcagtacttatggcaagttgaaactgcctcatttgtctgtttccttatttttttaactgcctctgcaactgtgatatgcatcctgaaggcagagaccaaatagaatctattcattgcttaaactttgcccaaagcctgaagcaaagtattctctcaagactctcaataaatatatctggaataaatcagcagataaataaataattgcttgagcagtttgctattttgcctgggtaatattttttctagtagactgaaataatgtctctatatctctgactttcaaaccataatatttagtcttgaatttccattcctggaactatacgttcatatttccaagtgcatttctcatgtatatctcaaatactcaaaactaaattcaatttctcataccctatgaattgtcctattacttccctattttggttaatgatccaagcattcatccaaacccaagacctggaagtcatcactcattcactcatgtattcacatatttattcattcattcatatttcgtgcagcaactattatgtggctcacactatgtgaagagtagcatacataatagtgaacaaaacaggcataaccacgtcctcacagtttgttctaccatctctctcaaattatgttgactgctgaaacgtgcatggtcattctactttaagaatgtctcctgaaccagcaccttttgagtgcaccagcactttcttaaaccagaacctcacacacacacaccttttctagattaagccaacatcacctcttatctgaatctttgtaacagcttccggattggtttccttgcctctagtctcatctcattccaattcatttgtcacactactcagggcttttcctaaaacataaatttaaccacctcatggctctacaaaatttccctgtctcaccatcacttacaagataaagttcaaactctgtagcacgacatgccatgtccttaatgattcaactctagcaaatggcattcagcttcatgaacatgacctcatgtctgcatatgccattcccttaacatggaacctcccttctgcgcttcaccatatcagcctggcaaactccttccattctctcctttcttgttgaggtttccctgacttctctgcccattgaggcagaagcaagagcttttggaaccatgttctcgtaatcccttataggaaggaatccatgctatcatactgcattatgggaatgtcaaagatgtttatatgtctggcttcctcactagaccatggacaacttgcaagccaagaatctggcttatacaagcttctatctacaccagctggcatagtgcctgcaacatgggaagtgttactactaaatctttgtgcaacaattaaatattgattaaacaagtgttgcattttcagtcatttgcctgaaatgacgcagttatcagtagcagagctgatccaaacttccaagttcccactcgaatggtttttcactaaagcaccactgtcatgtatccaatgattttcaattgatccagggtagagtaaagccacagggcatgccttaggttggggagatgggttagaatcacctcaggtctttttcaacctaaaatgcttatcggcattctgatatgtatttcctgaaaaaaattgccagttgggtgtcctatatattatatgttgaagaatgaacaatgctagtagggaaataatagaatggaaatcaggcaggtgtggatttaaacatctattccttaatttatcagctttgtctacagatgaggaaactgaggcacagaatgtgtcatttaacttctatgtgcctcagtttcctcatctgtaaacatggtaccatatttgggaagttataatgaggattttgtcagctgactgacccttggtaaagggtgagaatatttcctggcacatacgaagtgttctaaaatttagtttctctttccccttttccccctaggctttgatcagaaatccaagcacacaaaaatggcttttccatttgtgtaaggggaagattattgctctgctgatgaattgtgtgcatttcacgcacactttaacagctccagggcgtcttcaaattagagctccttatcactcattagcaccattgcaggaaggccgataaacctcacctcttgcttagctctctgacacagctggggaaacctccatttgctcttatcatctgaattctgaccttaaaggtttcactctaaccccagggcttaatttatcttctgttaaaagcagcagttttcccttacatggaaactgtcatgccccgagtatgcatagtgagacagagaaacagtcctgtctgtttcatctcagacgcgagggaaaagtcccttgcacccttctcttctgcggatagatgggctttgattacagaggagcacattgcaacttcaggctgctattgtacaccacatactgtaaaggtttaaaagttgacaaaatgccatgaataccattgtgtgaattcaacctcgtgtttgttttacctactgtacatcagaatacacttcctgatagctgagagtttgtgttgttttgactaaatttggacaaatatgcataaaatgtgtattcaacagatatttcatgtaaaaacaaagaaaggcttgtgtctttagattgccccagaacctgagggctactgagaattataaataaagttggcttcacaggcctgcagtcataaatgacatttttttaaatgatggaagggggagatttgagtggtacaggaaccttccgtttaattcccctcctcccaaatatgtccaaaatttaaagaaagctcctttaaatataactcagttgaaaaggagcttttgattcctggttattggggaaggacctgtttaactatttataccattgctttgttttcttaaaattgatgcaggaggaacatgggtccagcccttttaaaatcctatgttttatcactctccggttgatgggcgcaatccagcatgaggaaattagaaacagctggagtagacacaatgctttcttttgaaaagacatttcaaaattactagagaaaaatagagattgctctaaagagcctatctcaaaatgtggtttctggctcaacagcatcagaatctcctaggaacttgttcgaaatgcaaattattgggcttcatccagccctgctgaattggaaattctgaaggtagggcccagcaatctgtgttttgacagctcttctatcccctaccccaaggaattctgatgcacaaaagcaaactaaaaatgagacctaaaccacaggaaagagtagcaagagaaaagaaatcttgaaaggccagagggcaagagaggcgtgatttcaggacatttaatgattcaaaggaatgatggaaaggtgctaattgggtacttaacatctatacttcaacatgcatctgtttctaaatctgaaattaatggacagactataaacagcttccaaaggcagtggaaaatacaaacccaatgaaacaaaccagagtcaggaaagaggttggcagcacaataactgcaacatcaattgtatttagatgtttttgtctatagtctatactacataataactacatagtctatatagttatttcaacatcattaaataggatgtgtgattaaataagtgcatgtaagtaaattattaaaatgcattaagagtatgcttttgcatacttgtaacttagagtagacaaatcctcctgctgagaaaaactagaaactgaacaaaattcagacaccacgtgtttgaatgcctcagaaagctgtctaagcagtcagatcctggaaaggaggggagctcattgagagaagcctgacttttgaatccaagtttcccctgaagttgaacacaccatattgcccagaaattccactcatatatacatatatatacacaaatacacataaatatccaagagaatgcacagacacacacacatatccaacagaaatgcatgcatggatatctatctatatatatatccatatctccacatatatatctctaacagaaatgcatacataagtacaccaaaaggcatgggtaagaaattttctatttgcaatagcctcaaactgaaaactacccaaacatccttgaacaacagagaggatgaataaattgtactgtattcatgcatgagatactgagaatgaattaaatacagctacatgcaacaacatggatgaatctgatgaatataacatgacatatctcatttacacaatttcaaaatcatacagtgataatccatggtattagaagtcaagataatagtaacgtttgatctttatggtaaaaatggtaaggagagggtgagggcctactgagttctgcttatgttcctgttgctgaaccctgcactgtgtgttccgtttgtggaaattcagttagttgaatacttgtgatttggacacttttccttacatatgttacagtttaacaagcactcttactttagaaaaatatactaagaggaatttttgttttcttgtttctctgacgtctttggagtccatccatcaggtgtgtctatgccatcctatggagacaccctggattatctgaaagtaactggaggcaggagaatgtgatcatagagaatcttagattagtgggtagacaggcctatgaattgctgtgtggctttggaaagctctttaacccaagtcacattttcctcatccttgcattggagttgatcgttaaaagagcatctaactcataggatttagtgaggattaaataggagagttcatctaaagcactgatggtggcaggcagtgggtgggggtggcctaatggctaagaataaaggctgggtatctaagataattgacaagggcctttctttttttttttatggttaatgtaccattctttatgagaatgtgctagcataatgatagagggctgaagcatgtaatctataattaatacaaagtgaactgtcatgggggatggggagggaaatgggcctttctgcagaaatgtaagtgcggtcatggaaacggctatagctccttgattgtaattattcaacctcactagaggtctgcaactagctattaaagtgctagtggtcccgacaagggcctttctaagaacactgtctttgcaactgtaccccttttgaataatataaatatcatggttactcacttggcagagtggacatccctaagaaattcaatcagacattttgaggttggtgagagagggagagttgacggagttggaggaagaagaagtcgtgacaccatgactgagaactctgtctgatgacccagggtcataaaatttatcattataaatgtcaaataaaataaatgataattaatcaataaaaaatgacacatgataaataaataaataaataataaaattaccatctgtgcagggcaggctgaaaatgctgagaaggtaaaactctctaggagaatccttcagccagtgactgatgggagttggtggatactcaactcccttgcctcttgagccagatgactgaaacgtatgctctatactgtcccccagagatgcccagttgaactgggctccagttacccacagtggtaatttgcttaacagcataccttctattgactgctttcccttacctgtatcatttttcctttcttttcccagtgttttgtgagagcatcttccaaataaattacttgtactcacattcttgtctcgtgaccagtttctgggagaatctaaacttaagacagtctgcattgcacaacttatggcgtaggcttagttgctttctctgagaccttcgggcagctagcaccactgtggctgcctcctttggaattgtcacctctaccacgctgccgaagtgcctgagacctactgctctgaaaaagactttgtttgtcactgcccaagcccactgtgaagccccttcccctcccttgagccaggtgtcaggatggccctcctatcctgtccctctgttacctaggcagtggcctcatcactttattcataaagttagacttcctcactctgtatctgcgtattcttattgctttctcttttccagagactccgttttggtcaacaattagcccttccacatttggatcctgggccacatgtggaaataaagagttccagaagaattctcccatgaaggcattggaatgcttcaatacatagttttgtgccaaatctacaataatcttcccaaaagaaagactcttcagtgttctggatttttcgggacttatcttattttcttgtgcaacatcttaacacaaactagaataaagatgacatataatcatctgcattcatgaataaaaagaatgatctaattgtactaattagccaaactgcaacccacaaaaatgcaccaagtctttatcaacatccacctctggttacagaatgtatcatgatgccttattagcagcagcccaatggctccctggagcaccactacttctgtcaatacatgctaaagcagcacagaaacatctacgaagatagggaacgttgggtaggaaagaccaggactgcaaatatcttgccatcccagccttggaagggacctcaaggccatgtagttcagcctgcatcccctcagagtgaagcattctgtgttccccaaaaggcaggagaaactttgcctgtggtagtgtgggttgcaacccttcaaggatgcttctgagaatcatgttgttaagatagctactgagcaaaaggctgggattctcaaagtcactttgagcgcatgtaataggaggcagagatgaggtcatctccctaaaggtcagctgcatccccagatgtgttcttacctcagccctcacttgaagagagccaaaaaaatggctcatccaggggaaagtgtgggacttatgcccacacgtccatagcagaccaagcacctggccaggcccagcagccaggagtgaccccgccccttgttctctgccaaacattgttccttgtacttggccagtacccgggttttgcagcctcagacatctaaccaccttttcccaaaggacctcacccactttacctcaaccccaccccatcccatcccttggccagacctgtaattactggacctgaaaagcagcctccaggataccacatgggggcagggcagcccccagcaagcagccaactaagatttttctttctacaacatcccttcactgttctttctccctcatcctctcattacctcctctcagggggttgtgccagccagggctacccctcacacttttggggccagaacaaaagtaaaataatatcccctctcctgtcccctgcccagtctatggcttggttctttctcttcctaatccctgactctgtccacatgggacagcccacgcaggtgtacacacactccatctcacagttccagccaccccactgctatgcaatggcctcttgctgccccttgggcctgtataggtgcacaccatccacttctaatggggacagaacaaggaaagattcccctgcaagttctgaataccagctcaggaccatttgggtagggaattctgtttccaggtgtccgaagtgtggccaagaaggagggatgttgggtccacgaagggtcatccacttgaccctgaaggatgtttgccagagaaaggtcggagttgggctctctaaaaggcaggacccagggcaaagatctaccctggtaaagggttggtactggcaccaacttactaaagagtttctgggcttccagtgtcttccttcttcccactgaagatatctatgttggatcaaatcaaatctgtttatgacacctatcatgctctaaaataaacacagcttctctgccaagccttctacaagaaccaaacatggctttcaaaatcatttccttcccatacctgagcattctgtgaccggtagacagaatcttaaaagagaagaccctgggagcaaagagacataaacagagtagctgctgtgccttctgagaatgaggggtcatctgctattccctcagggtactcagctcagctttcctggttttgttccattttgtgagaagaagtaattatataccatatttaaaataagtgctattaacatctataagcacaagagaagttacgagtttgcaattttaaatgtggtaggcttaatgagaaaatgacatttgaacaaagacttgaaggagatgaggtatttacctatgtagatatctggaggaaccttccagacaggggaaacagccagtgcaaaggccctgtggtaggtgctcttctggctacaggaagaggggggatgtcagtgtacctggaactgagcaagcaatgggaagaacaaggggaagagatagtaaccagattgcacggagcagcacctcttaaattacagaactttcactcattagtgagtgagatagaagagggggctttggaaagtcttgaaaccagaagttgtcatagaatgacggtggctatcattggtgagaatagctaagactagaagcagaaagaccagttataaggctattgcagcagtctaggcaagagatgatggtggcacaggccagcaaggtaccagtgtgggtggaaggaaattatacaaatctggatatatattgaagaaaggttcaatgggatttcctggctttcttcatttttggaataatgtagctactctggcattagtccaagtcactagtagtcattgaagaacaaagaataactggtggaaacagcttcctccagtgaatgttattgataagggatcaatgtgaggcacaggtcttaatctcttgttccacctccaatcctggcgatctttccctctcatgactcatgctcaaaatttgtccagttcctctctatacgtctcattcataaatgatgttggtcaccaccttctcattcagccactgtcaatacttctgaaaccaattggaatgtaagtaaatacatgcattcctaggtaggtaggtaggtaggtaggtaggtaggtaggtaggtagatagataggtagatgcatagattcccaagcaaccaaaaatatagatacaatggtctctgcatttgattatgtgcttgcttgtttgaaagtgtaatatcaatcaatgcatcacgaattgagccaaaggtttagtgttggtgttacttagtagcgacagcaagcaatttgctcaaatctcttgggcttctgtttttcccttgaaaaatgaagtgagtgggaacggtgccccttaagtaccagttaagtttacacatcacgttttctgcttccaccatgcccctgcacctttattttctttcatctttccagtgatcccccctaattaggagctctgcttataaatggtatcttttgtctctttcagttactttcttcctccctggtttaatgagctttctccacagtgtgcctttttctcccagtagatggcagtattcagttttgtttcctgatgctactttgccctgttggaaggcctgggccagctgccctttctgcaaagcctatgtccttttagcactagaggtgatcacagaagaggaaattaagggaggaactgatgagtgttgaaaggctcccatgaaaaccgtggcgatgccaagtagcctcctcctgttttcaagcaggtttattttatttaactttcgggttagtgataaaaacaacggtcttccacatgtcaaagtgttgtcccaactcatctgatctttctactctgtgacgcagttagtacagatttcattgacctcaggtcttgatcccaggagttataatgggatggctgctgttgttgaggatattcagggttagaagcaggaagaccagttaggaggctgtggcagtggtccaggcaagagaccgtggagctaccagccgggagcactgcaggtgggggatgtggtgtggagacggatggtagtggaacaagctctgagcttgctacctggagaaccagagtctcctctggcactgttatttcactaatcttggcaacactctcaatttctctgggcctctgaagacaccccctgttctaggattctgtggaatcatgaaggaaatcaatccacatgtagcttgcaagtcacctgacaagggacacatcactcaccggttaatggtgcattgagagccagaagccatatctttagtaggggcttcaccttaccactaactgaagatggtgtgaaaacatccatttccgcagtccagtttcttgtctttccagaagaaatctcatctaggaaaacaatatgtgtaacaaatcaaagcaaactgctccggttgaaaggggatagaatcctgcacctcctggcccccaccttcccactgactgcaagtagcaagtaaagacctccaacagagaggagcaaaacccctgccaatgtgacttcaaatcttcaagtgccgtgccttgacctatgttaatcaaggaattctgggatcactaatatcagttttttcttgaactcctcgggaaaattttgcagggaggagaataatataataagagtatggaggaatttttgtgtttgggagtgggatatattggggcggatggtgtcacacaataactttaaaacattttatggttcttaattgcctataagatcaaatttagacttgttagcatagataaaggagtttcataatctgcccccattccccccctccaatcctggaggggatactatccttctggtatatctttgaagatgccacgcaccttgacactcctactcattccagaaaacacaactccaaaaccttccttaagcaatagccctgacaagcattcatagcgttttgtatatacaattcttttacagtctgtatcacagtgtttgttttcccgccagcttccctctttgtttgttacttgcttgagaatagggaccatgtcttatacattctaaacatcaagcatgatccaagagaaggtcttactgtgcaaaatcaatgaataacaggaggttttgggggtcatgttgtagtgttaggatgtgggaaaatatcataagctaagggatgacttagaaatgtattacagataatttagtcaaatacagccactatggccttacaaagaaatgtgtgtgtgtgtgttcgtgtgtgtgtgtgtgtgtgtgtgtgtatatgtgtatatatatatatatatatatacttgcaattaatcaaattgtttaatgtctgcctgcttagtaacaaagagattacatagtttgttgttattattgcttgtaaatgaccttgcagagtttctttacaatccattgggcaaataggacttcagtaggaaggaaattaatacgcatgaattcagcatgcacaataattcaaccaatattgtttgatgttagcatccttttgaaaagaaaaggtaaaacaaattaattgtgaaaacagagttgtattagaaattctgatctattttttaaaatgatctactttattgcacacaaatagcatgtttatatgcaaataataataaataagccttatttacatgtacatatttgattactcatttgtccatttaaaataatgcaatattttatattgaaactttttatttctccaattgcagtaaacaagttcctcttacaggttactcttatgatcaaggataatatagaggaaatgagttattggctaatgctagccaggcattaaagaccactacaagtgttgtattttctctttttcatttttctggagatccatgttcattaatgtatttttttattccttagaaatatttttcgtttagctttttaaagcaactgtgtcaaactccaaaatattccctgtattaaaaaatattatatcaatttaatcctaagtataattttcttagggaagtaatttaaaaacttttctacagtcttaaaatgtggtgatattctattatgaaatggaaggacaatggggattcagggcacagattgtaggatcttgattgggttcaaattccagccctactacttagaagctgtgtgactcagagcaagtcactttgccattctctgtctcattttcctcatctgccaaatagtggaaatcaatgtaccagtctctcagggctgttgtgatcattaaatgagttgagatgtttaaagtgcttagctagaaaaggtgaggatacattctcctccagagcctcaaaaaggaaccagtcctgctgacaccttgactttgacccagcgaaactgattttgggattctgttctgcagaactgtaagagaataagtttgtgtggttttaaggcactaaatttgtgataatttgttacagcagccatggtaatctaatatagaatttggtaacagatttccaatattatcataaaaatcaatagaaaaataaaactctgcttatataaattgaacttgaaatgcattattaataaatcctatttgtttctagcaggtaaaaattaactttttaaaaatgcggtaatgtgtattttgaaattgactttctttacattgaagacataggcataggagttccatatgttctgattgcaatagaatatgccatatggaagatgattaagtcttcttgtttaattaaaaataagagaaagtctttaaatcctcttatcactacaggatttcatctgatgcctctggaaaactaaatggccctttacttttttgtgttaagcagtctgttttctggtcacttttattttctactgagaagaatttatcaccttagaaaatgaaacagaaaggaaggatggaaagaaggaatgaagtagataaaaagaaagagctgtaagaaggaagggaaggaaggaaggaaggagaaagggaaaggggaaaggaaaggaagaaggaaggaaggaaggaaggaaggaaagaaggaagggacaaggccggtttatgagtaagaacaaacattacagccaataccaacaatttacaactctaccccaaaatacatgcagatttataatcttcttccactaaatctacagatgtttgaaacactacaaaggatataaaacattaaaaaaaccccaacatcctcaaagcatatgtacacacatgcccataaccactgctaccattaaataatgtttcaaaaactaccgcagggggcatgtggaatttataacctctcccttttaagtaattccccttcttcatattttctgttacctgtacgtaaatttggttcatgatctgtgtgtaaagtagaattgattgttttataagacatacaaaaataacctttctggtcctaagtatatataaagtctcaaacacatataaaggtacttcaaactaccagcaaatagtttttggtaatgattttaataatattgttcagctggcaatacttataactaggtcattcacattttaatattctcacctttgttgcctgtgtaaatcaccctcagagtatttgactgaagttggtaccaacaatctggttggtgcttgacatgtctacttgggataaggttcttgagatatttttctcagctcataagccccatcagttatctttgcaaagtaaagcattatttacaaggatcagaaagtactacgtataaatcaacacagatgttaaaaacataactttagattcatatcccagttctaggcaagttgaagagttttctttttttcttttcttttgagacaggatctcactgttgcctgggctggagtgtactagtatgatcatggatcattgcagcctccacctcctgggctcaggtgatcctcccatctaagcctcccaagtagctgggattacaggcataggccaccatgcttggctaagaactctttttgagtccaattttactagttataaaattgaggggaaatggctgtttataaaaaactaatgaagattcaatgagctcatgtacctatgatcagttttcaataaagggcataatctccactgcggagtaaaccaacccccagcagcagtgacactcaatgcacgaaacagaatgatccagacagtgctgcattccttctttgtggaaaaaaataggtggttaagatgggggaaaatgttgctatctatagataaaatttccacatagatacagatgcaaaatggaataaaactatttcttatgaaggaactgcaagctaattattatacagtattcattgactctttgatatgcatattcatcatctcagaatgcatcagtgaaagttttcatggtagctaaaagtagccacaatagagaggctgactatattgcacagaagttgtccctttgtttaagcccccaactcatacctctgtgctgaccaagctggtcttctgttacgagaacattttatgctcaattctgagtgtgtattcactttgactgctctctgttttagcaggtccttgttctctctccacttacaaaattctttcctattcctcatgagtccacctcctacccccagctcttacagggaacctcccattattgccttgcctgttgatagtccctttctctgaactgccgcccagtctggcatttgatcagattttgaatgatgtagatatgagcctttcatagacccactgaactggaagaggcattagaaagcatctagtccaaccctctaattttatagataaagaaactgtactccacagagtgcgggcatcctgccaaagatcactcagagagtgagtaggatcctggcttcttgacttctcatctacaactcttcccacttcaccactcagatattgtgttggtgccaatgtctcatactttttgcccctctctcctcttggttgtaaaatcctgtttctaatattttgatcttgtcccttttattagagagtacagttaaaaaaaaagaaaagaaacggtttcttgattatttccacataaatgtgtgtcacactcaccttaatataggagttaattcctggtcttcctcaatttgctggtagttagggaaaatgtagagaatagggtgtcaaactccactgtttccaaaattgtgaatttttcattttccctcctcacatattttacaaatatatgcctacttttacaagctgtatacattgctgataaagtatgcatgaggaatatacctataattctcatgcaatatgcataaatgccctaaggtttcattaagcatttgcatgtttaaaataatcgccacctcaatttgagggatattctaataaaaactgaccttaacttaaaaaaaagtaaatgtcataaaagacaaaaccaaaacaaaataaattttaaaaaccatgtttcagattaaaggattatcaaaggagataataaatgcagtgatgctggattgggaactagagcagagaaaataaaatatctgtgagagacattatttgaacaactggcaaaatttgattatgaactgtgaatttagataatagtatggtattagtgttaaacttctgagttttattaattgcactgtggtttagtaagggaataagatgatgttctttttcttaggagatctatgatgaagtattttaaggtaaaggaacatcatatctacaacctactcccagtagtatagtatagcatagtatagtatagttaggtaaacaagaggcgagagatattacatatgataatacaagtaggtcaagataaagagtttttgaaaacttaaaatttctgctaatctatattcaatgtgttctgctcctttatagtctcagtatggtttcaggaagctctcaaagctgtgagcttcatcattcaggtctagcacaacagaggaagcatacctgtgcttcgcaccgattggcttgaactagtcacaggactaaacttgaaccaatcacaatgggcaagaaagtgatttagctgattggattagcttaaatcatgtgctctaatcttagagctctgcatgaaggtttcattccttggaaccccctggatactcgcccacaaaaaagagtagaggaaggactagactgggttttaacttctggttaagatgttaataattagcgttagatactttatatatgaagaaactagggtccaaattacttttgataatatgccaatattatgcaataaatggcagaactaagggtagaatttgggacttctgattcccatgccaagtgccagttctaccattgggttagaccaatgggtcccaagtctggctattcagaattatctagaggtcatttaaaaatacaaatcatctggtgcactttcagatttgttgatttaatataaatctagactcagacctaggaatctgtagtttaagtagcttcctggatatgttgatgcacactcaggaatagtctagatagtacaaaatagtgcaaaataaatttcaaaatcagacttttcctgaaaatatgaacaaaagttttgaaagattcttaaagcaaatacagtagagctttggattatcaggttttttcattgtgtctccaagcaaagttttataaatgctaactttccaaaaacttaggcaagtttatttcagtaataatgtttatgagtttatgagcaatctgatatgatttggctcagtgtccccactcaaatctcatcttgaattatactcccataattcccatgtgttgtgggaggaacctgatgggagataatttgaatcatgggggtggtttttcccacactgttcttgtggtagtgaataagtctcacaagatctgatggttttatcaggagtttccgcttttgcatctgcctcattttcccttgccgccaccatgtaagaagtgccatgattttgaggcctccccagccatgtggaactgtaagtccaattaaacctctttttcctcctactctcaggcatgtctttttcagcagcacgaaaatggactaatacatagtccttttgcttattccaaacaaagttgtagtatgaattagaaacattgataatatgctcttaattgagaatacgcctacagggccacaaactcagacatgaaatgtctgagttactccattaatgtccatcacctgaggctctgtgaccacagcccagtagtgctcttatcagatgctgcctggtaatgagagtatttctgacctagtacaaagaaagagcatataaacattcagggctcccacctctgaacagtgcacagggaattttcacaggaaactcccatgcctataaattcggttaacatgtaaaaaccccactgtattaatgggagacagtcagtagaatggaatgctgattgactggcatatgtgggacaaaaattctgctccaaatataagcacctgtagatgcccttcccctctctcccctgccttatctcacttgacaaaaactgtttagatgagatgtatttcccagggcttatgaatcagttgcagttaatggctccaggacaattggtgacttttatcttcaggaaatcccagtacttagaaaatgaccgtcagccgtgactatcatgccaaacaacttttctccctctatttataccaggtgattgaacaaaaaaaggtaaggggtgtgggggagggcataggctggagctcttgccctggtctgcactattgagtcatcaccataacatgccaaattactcaaataagtctggtcatgttcacattcagcagtaagaaggatactctgtatgactcgcacgaggacatgaaatgccagcgggatccatataatcaacgtcttggcttgtgccaagaagggtgggtggagtcgtgtgccacatgcaaggaattcctaaatgtttactctaatttgctgcctagttatatttgacttctgtgggttggcacagcaaccattctatataattctggctcttctgattgttagaggaagagtctggggctcttaagctaaagtttaaaaaacagttgtttggagtcatcgttccttctccgttagagtaattgttgagcatagtgttgtggttactccccaggttccagagaaagatgggtttagatttcagttctggttcttactccggaaatgtgcctgacttctccatgtttctgcttcctttcttatttccataatggggataataacagtgcctgcttcatgaggatattgggaagactaagttaatgtgcgttgagtacttagcatgaaacctggcatatagtaagcactcaataaatgtgattgggttagaagcaggtataatgtattattttgggttgggtatgtgtggatctttctggatggtctgttttttcaaaccctcatgtagaagttaccttctctacccaatagtcaacagaagccaagactcatgaggttcattttatgctgtgaacccatgaaattgtatgacgttaagggttgctctggccctgttcagaagctccaccaatggcaaaatacctttaacaatatgatactgtatcctgaaataaagacctgcaaaatacgatttgacttctgtgctctgtgaaaccatgctcagtgctttctctctcctagactcgtgcctctcaaacttggatgtgcataggaatcacctggggtctttttaagatacagattatgatgcaggaagtctgggtggagcttgagactctgtatttctaacaagctactcagggatgcaaactctgttcttccctggactacactttgaatagtgaggttttggctgtttggctggatctgatgcagggccctgatcccattaccatggggaaggcaagagtctctggcagagtgacactaaaccagtgcccattttataggtaatttcatgtgtgtgtggtaggaacagagggaggagatggaaaatttaagagagtggtttcaaccccagctgcatattagaatcacttggtgagctttaaaaaaagtactctagaatccacatgaacctatttgaatgaaaaaacaaaacaaaactcaaggtggggggagctggttcaagcattttaagaaacactccacgtgatcgtaacctgcagcccaagatgagtaccactgttctaaaatagtggttctccaatgttaaaatgtctcagaatcacctagagggcttcttaaataaagactgctgatccccacacccagaatttctgattcagtaagtctgctgagaggcctgagaatttttttttttttttcttgcttgcttgctttctttttttttttttttttttttaagagatagagtctcattcttgcccaagctggccttcaacttccgggctcaagcaatcctctcacttcagcctcccaggaagttgggtctacaggcatgcacaagcacacccagcaatgcatttctaacaagtctttaggtgaaactaatgctgctgatctgtgggccacacattcagaactactgaactattatatagaaagtaatttattcattcatttattcaagtgtttgcagaacccttacaatgtggcaggaaggattttagatgctgggaatataacagtgaataaggcatggttcttaccagcttagaaatggggtgcaccaactaataagcaggtagcactggacacattcagaaatacataggagaggcaccaatctcaggaagtgatgtccagggggataccttaatggtaagtcagaattcatcacaaggtaagctattgttgggggagcagcacaggacaagagcgactaaggcagaagaccacattcacatggagtgcaatcccaagttcgtctgagctcagctgtggagacttggatgctgggaagggaaggaggaagagtgggacttttagacaggcacagctggaaagatcagcaggagccagatcacgaagaacatgtaccattcaaactttatcccagggacagcagagcaccagcgaaaggttttaagtaggaaagaaaatactattctggccacaagatgaaaaatagaatgtaattgagaaagggagactggtaggtggaagaaaggcaaggctattgtcattttaagatgtttacttgcaaattgtcttaatggtctttttcttagacaaccagatgtcaatctggcatcttagtgtttgaagtctggaatgggcacaggagagtagagtaagaagaatggagtcttcccatgatggtgggtgaagaggggtgggatagagtagcctcctcaagggattgatgcttggtccagaatcagaggtgaccataagaatttaggatttatctgaaaccttataagccatttcaacaaatatttagcaataaactttgtccaattctgtaatctcaagaaagtcatctgagcttaaaaacaattggctgagatggatgtgcattgcagctatttaggaatgtggtaattagaatattgaaggtgttatctgcccatcagttgggcagtcatggcctgtcctaatgccaatctcactctctagtcagaactaatgctatttctgagcctcttctcaatataatcaaagagatatggggctgaaggggtaatggaggttaccttgtcttccttcgtcatctcaggaagaaataagggcagtgtacacatctccctaagtgtggaaaactatgacgacaccgggtctttctgacgtttgtgtggattcacaaactcccaaagcaccatattatttttaaattagaaatttctgaacagacagaggattcagagctctcacagctaaatgctaaggaaatatttattgatgtcaggatactttaaattatggccttctctctcctaaaatatttcccagccgtcaaattcgccaccaaaggaaatcctttggcatttctaatgccctctctactcctagaagaattttgagctgcttttggggacaaagatgttctactttttttttttttttaacaattggaaagataggtgcatgtgttgttttattgatttatttagactatacatacttggtttatacgttaccttatttaggattcacagcaatgccgtggggtaggttttcatcatttaaattttacaaaagagaaaataacatttgtaaaagtctggcgttcaagatggcacaggcggtatgtcaaaacaccagggccaggtctgtctgacatgaaaccttatcagtaagtttaaagaatttaaggtaagaaggtcactcttcttggagaaaacgaaaactaaattcagcagttatctcaggctcttcaattgagagaaaagtgaaacttggactatggtgaggagctgcaacttgccgcaagttcagatctgttaaggcagtacttctctgtgctttggatctcacttgtgatctttattttagtcacatggaatggtgccttaaaaggctacacccaaatcgaattcccctcaaagtggcctggagtacctcctgaggttaaaaagtcacccgaaagagaactgagcacagaggaaataatcactattcctcttttagccttgctgaaagtatggaggctatcttcccttgtcaatcttctcaccttagagacacacacctttgttttttgccgggattcctcattctcactgggcccatggggtttaaagtgactgtgttgttcacaacctgagcagtaggtgtttgaataaccacacactgggcagtttcttatgtatttcttcccactgcattcaacccaatgtcatttggcaagtatatatgatgcattgttggataacgttggaagcttaaactcaaatgggtaaaaaggcaactaccttgtcttctgtcagattcccagtgctttttagctccttcctactcaaaatgtggctcatgggcatgacattggcatcagctgggagcttattagaagcacagaaatgcagagtctcaggatccaccgctacttgtatacactacgtgtattttaacaaggtctccccaccccataattcaggcagaaagtttgagaagtcttgaaaactgttgttaggaggcagatctctcatcctctctagggtgcacaggctacaagaaggagccttggcaacaacctccaaagacacaattcctttcagagcttgtttcctgtttgataactcaccaaatctctaaaactggaatgtgaagcgagggttcagccaaggaactgggtgagagttaatggatcaatctgctctcccccgtcagtgcttttaccgctgacttctggaatgtgtttgatgaaaagaaagcaacttcttcagacagaagatactgatgcagcctgctgaggttaggacctacaggaacaatacaccaatgttatcagagcttcgtttgcctccaacttcagtccaaaactgacaacgggagggaaagcattttttaaagccgttgctgtcagctgccattattataaatagcaattgctctgcttctccctgggggaatgtaggcatcattgtttggtttttgtttagattaagaggttttttccaatagctttttacaactagatctgaaaaatgaaactagtagcacagtgatgctgcttccatttatcattccagaagcttggatatgttgaaagtcaaaaccagagaaggaggttcctgcttctttcctatcatcaggtttgagtgccctttctcaatgaacaattaacaaagaagtcagctctatttaatgttctgtgttcactccagaatttcaggaaagtaagaagcaaggagagtcaaaagaatcctaagtcactgatgtcttcatcaacccaatcatcagtgacctctaacattagctgattttctcaataaacattgtttatctttctcactatggttaaatgagattatgaatacaaaccaaatcctctgagtctagattttgaaatgtggccataagggccaagactgactgatggtttgtaggtatatgagggtaaaattagatctgctggctccatctgaaagaggcaattttgagagaaaattatagtggcaggtacaggacaaggctttaagcttaataatgccgcctttccattataaagatgtactcaggacccattcacgggtactgtctaccttttgagttgtatttctgggagtagtcaatttctgggaattggatcgattgacctgctttttaccagattctctcctttgatagggttggcaagcattacaaggtggctgaagtcagttagttagcaaacccacctggggtttacaaagatactttttacttcgttagcactaggaaacggagccaaccaacagccaaggtcacggagtttgtacacctggcttggaaaaacgagccaatcagaattaatcaaaactgaagtgcaaatgactatcctgaagaaatggaacatctagtgaaattggcatgctggggcctaaagaaaaaccacctgaaagactttagctcaccaagggaccctgttggctctcagaaggaatttcagactttcccactagctaagcccattaatatcaagagctttattagattaactggactctggtagcattttcaaggctcagattccacagcctttgtcaataacagtttccgctgtgaaaatagtttatttttgtgtttcttcaactccatagataaagttgatcctcagaagggtggggtgcttgtgaaggagtagacacacaactccctgggggactcttccatcgtgggactcttcctggccatgcttgggaacacagacatgcctttatgcaaagaaagggttccactagaagcacacctgattatactcaacctggatccaaagagccctgtgccatgtcaaaggaaaatgttctatcataaatctccagaaacagaaaaggtcaaaaccactcttggtaattagcctgctgaaatacagtggccctgctttttgtttaaccttttaagaaaagggctgcactctcacgagtctcaacaagcaggctttaattaggcacatcctcaacactcctaccctctgcttagccccttcccccacctgcagtcctaacagaacatgcgtttggtttgttgcttgaatcccctaactttggatggattcatgttttcttctcagtgcactttttgtagtcctattttaagtccatggaaccgtatcactttgcagaataaaaataagctatatatagactgacctccaaaaaagggtgtcatgttaaacaactggaaaaaatcagcaggcatgccatgcaccagcagttttgtttgtttgtttgtttgtttgttctaaattctggccaagttagcaataagcgtgcaaatgttcttgttaatgttactaggtaaaatgctttactgcaatagccactagctatgtgagcacttgaggtctagtttgaactgaggtaagatatatgtacaaaatattcattggagtttgaagacttattataagggaaaggatgtggaaagatccattagtaatttggatatattgggttaaataaaaggtattagtaaacttgattttccctgtgccttttgctttttatacggtggctataagagatttcaaaattacaaatgtggcttgtattgtgtatctattggacagtgctggtgtagcagatcaattattccatgtatagatagagaaaaataaatgtcatatgtttgatttggttactgcatgatttatcacataattttgtcctatcttgtattattatatatctttcttgtttcttgatcatcttccagccatattggaaactttcagaagataaatataaaatcttaaacttattctgcagcccatattgtacctaggacagtgctaggcacatgataagtgtttaatcaatgtttgttaatggagtaaaactcgatggtaggacattttcaaaagatttctttgggggctagtctgagagttagaacacaggttagccactgaatctgatggaatatgtctcactatccttgataattgttctggccaatgagctgtgagtaaaagtaacacatcacttttgagctgaaaattaacttcagagtgtgatcttttgttctctgccatagtgtttaattatctttttttttttttttttttttttttttttttttttttttgaggcagagtctcactctgttgccaggctggagtgcagtggtatgatttcggctcactgcaacctctgcctcccgggttcaagtgattctcctgcctcagcctcccgagtagctgggactaaaggcccgcaccaaaagacccagctcatgtctgtaatcccagcactttgggaggccgaggcgggcggatcacgaggtcaagagatcaagaccatcctggccaacatggtgaaaccctgactctactaagaatacaaaaatataattatcttttatatagagactactcctgttagctgttgtctccaagtgacctgcaatagacatgcagccaagcaagagacactcctttgttgttttcagccactgaagctcagaaattctttgtcgtggctacacaacctcgcttctgccaactgatgtagcatggctatttgactacagattggcttcccagctgtggctcttcctttgcaaagctcatattttactaacatttagtctcaataaccaaaaacaaagaggatcagtattatactcacctcttgaatcaacggtgatctttaattacaatgtctggagtcagagtgtctgccattaaaacatttaatttttagcagtagtaacgagttaagaatgctgatcaaactgcttcaggtagcttcccctttgaggagaggagggtaactgtaaatgaagcagcacattttaaagggcattgctgaaatcttccttgagcagcaccaactggtatttgttgatcactggactccctttagctgctgtttctgagaacaacctgcctcctgccttaccccattgagctgattttactaggacacaggaccatcatgaggggtccttggtaaaggagcatggttgagggattactgaggaggggagaagtagaggagaaaagggaaaatcccagtgaggtggccccaggcaaagatcgaaaaaaactgaagtgaatctaatcatttggcagggcaatccaagtcctgagctttaagacgacacttctcacggagagagaaactccagcttgcagttctcagacatggccttgttattgttttacttctaaataaaacacttgttgtctctaagtatttcaattcctgtgccttatctcaatttgtaggagagttccattcagagcacccatgaaacagaagatgaatgaatcattttactgcagactggaatagggcagtgtggctaatgagctgtacgtttagtcttagaaggccctgggatgcctcacactggaggcatcatctaagtcctactgtccctggagactaagtgagtggtcactctgttaccagacaaaagtgcagacccttctttggacttaaacacagagctagtatgactgtatattaagggataaatttcagactttgtatgtcttttcctggatgaaacattggaaacattgaaacattggagagtaacagagagaatggggaaatctttggttattctgggactacagtctccttcaggctaagtgttaagtaggccaagaattgagttgcttcctcccctagtcagtatcctgcttgcgtgaagttcgcttctctagaaacacagtctaagacagaaattcagatacacatgatttactctcaagaggaggagagaaaagcagaagggggtagggataggagataagccaggatgtggtccagctgtgacccagctttggcctgacctcatggggaggagagaaacatgcattatactacagatgtggttccaccaggaagcaaagatgctgttcttttataatcctgtctcagtcaatcattagctgtgggctgccctaggtagggggcatcatctcttaggcaaggtggctcccggtggttcatgacaattctctggagaagtggggataagaagtagtgggtaagccattagcagccaacactcactgcagccaggggatgggtgcctctgacctgtacagggatgtgggcagagaacccacaacacccactgccttgctgcagttattcctgtatccatgctcatcgtttttcaggtcccggtatcctatgcttccttatcccctactttctaattttacagttcactaatctaaaaatcaagctccagctgtctgacctctaaaatgagagagtggtctcactattctctcaagcccctttcaacttcatgagtctactgtgtcatcctattgtaacgaaagtcgaccctttttaaaaaataatcaatggctttctgtagagagaatgtcaaccccagtgactgatatcaaggtggaagtttcagagcatctgatcagcagttaggtctagaaagagctgggtctagaaagactctggctagtgctgctccatcacaccttgagaattgttgccgatattgatgtttgagagggcttacctgcttaggcacctgcgcaccatgtgatctcttctcttctcgtgctatggtgagcctagaatttgaggaaacctggaaagttgcatccagggaagactgaagtcaggggatacagccaattatactctacttcccttagcatgtcctgtagtagcaggagcaaaccgtgcttccatccatctgcatcagctttctctgattatctgtttcctttttaatctgctacctttgtctttccatctcctccgtccacctcctttctcttcctcagaagcatgcagtgccacaatggttgaaacccactctgttatcctttcactggacagtgacttccaaatggtgggggactgtctaaatagtctagaacttgccaaatgcagatatccctggagtaagccagctgactgactggcttagagaggagatgccaatacacttcctcattaggatagactgtactgcatgaagcaggctggattctggaatcaggcagttgggtttaaatccagaccttgccatttattagctgtgtgatcttgaaaaagttacttagcctctcttctgccttcagtttcctgaaagtttctcataagtcttgaatcttcagattcagtgggtacatgttgtccaagacaaaaatgacataacaaacaccaagataaatcctagtgaagctgttaaaacacaagtattaaggaaatactttaatgggcttctagacagaagaagtggtcactaattgggaggatatttgattactctacatagaaaacaatgccagaagacagcagaacaatgtccatggggttctgaggaaaagtgtgacctgagaattttacatacacacacacacgcacagagacacacgcacatgggcacgcgtgcgtgcacacagccacacacgcacacctacagagaaaccaagtcgtcccttaagcatgaagtcgacattttaaaatatgcaataattgaaaaactagaacacccaagagctcttgaaagaaaaccattgacatatttaattcagccaatgaatcaaagaatcaatatatatttttaaagcctcagaaatggagcatccatgagaaaatgctggtgatggtgagcgttgaggttatttaaatacagaaataaaactgaacgactcttgaaattactgtgacagaacagaatgtaagtgtcataaaaaccaaatataaaaaaagaatacacataatttaaaaaggatgctagtttccacatttttcacaaagaagagtcaatagatactatctaacacttaatgtttttcacattttttcctttagaggataatttaagaattcattttatgaagaaatattctttttctgaagttgaatagttccttagctttctttttgtcccctttatattcaagaaaatctatttaaaccttttatttcaaaatgcagtcatagcatgttctcatttttctatgcatttattaactgatttatcaatctgtcctccatccttccttcctgccatccattcatccacttatccattcatccttctgcctgtatgtaaatatagaaaattgtctgtgatgaagatcttcaaatattggtaaccattgttcctgggtgaaaatgtttttaggtaacttttaattgtatctgtccttttaactgtcttgaatgatttactatgaatgtacatcattctattataataaaaactgtaaaacatcactttcaaaagtgaataatgaagaactatatgggctaacactgttaactgaaaaatgagcatagtaaaacctcatctttgtaaaagagcggatataaatacgtgtagatacctagacattttctgggagattcacaagtaacagatcactgtggttatttaagaataggggacagtgagactgtattaacagggagacttccttctttctttttattttccaaaatatatgcaacttaatcatattgtaataatgatgggaaataaatactaaaagaaaaaaagaaatggctaaagaccatctttggatgggtacaagaagactactacaaaccttttggtttatttccttgtgtggtccccaaggcttcaccttcagagccagtagattctgccaacccctactccagaggatgagaagaagcctgtggccaagcagcagcactgtttccggagctctcctttcttttttctttttttgccttacatgatctttttagccttgaaatcaatttcttgtttatattaatccttcatgcaggatatggttttacctttcatttcttacaacatttcaggccagtagtatgtaggaaagacataagactaaagtaagcctagaagcagagacataactagcaaacgcaatgatagataacaatggatgttttgatgctagggaggagtggggactgcgatgtctagaggggcagtcacactctgctgtgacatttgctgctatgtcagaacttggcacagtgtggcatgagactctggagaagttaggaatttagatttataagcgggttttctccattttaaaatcctatgaaattaattcaaatggaaaaacaaaaaaggcattgagaagaccactgaaaacatctggccaggctggatttggactgcaggctgctatttttttacttctactgtagcttacaaagggtgtgcatttgagcttcagcaggaattgttgcatggcatacctgctcatcatagataggtatgaccagttgctgtgtgggctttaaattatgtggccctagagaagggtgtttctgcatcttactgccttctagtgcactggaaaccttttcttaagaaatagaaggcggaatagaaatagagagtgtccacagaggaggtgacatgcagcatcacctgtgggtcaggatcataacatttttcaggctccttggatgagagcagggctgaattttggttgcaggaaacaaaccccagcaaagtctacctgtgggagcccagcaaaagaaactcagtccattcttctttcctggggatttgacatagtccgagggaaagtgtggcagtatgagctgaatttggctttgaaatctgggtgttttgactcaaaacagaaaagaaatgatgagtcagggtaacaagagttgatggaaaaaggatgacctttttgagctacacaaaataaaaaggcccttgactgcttgagaagaggcaagtaaatcaggtgctaggattctaagtccaacctcaagtttccataacatcagagtgaatctaaactcaaaggcagccttcagagagtgcatagggcgagtaaaacgaataacaaacccatctcctaaaatccttgattttgcagcttcaagattccgttctctccctgatgtgtatgccactatcgtgaattgacaggaacatgggctgtttaatttctttcttttcaaaatgcccccctttgcttcctgtcaggctagtcctacactacggaatccattcttctgcctctcttttttttaaattcctttcaagagataagaacccagcattaaaatgtaggtggcatagctttgaatagtagttgccattttaacctctactggcctacttgtaccacctaaaatgtggcttctgcaactactctaatttattgcattctttttcataaaaaaacttggacatagcaagcaaggtgtcagcatacaaggcaacaatgcattgagccaagatcttacaatcttattacaagataaagagtagagtgcctcttgcttaaggatgttctgtagatggccccaaatgctaagagcaatttgattaataatcccatctgttttactccttgaatttgtttccagggaaaatgtgcctttgatcactaggcgctgacgagggtataacctggcccgaggtgtttccctggagtgaaatatgcagcacttctcaactcccaattccatttaatttattgtttgtttttgctcaagaagagcctgtttttacagctgaacagatttggaagctggcttggggtgtttcatttccttacatgaagagttataatgtaggggatggtaaccagctgtttccaccttcactaaagacagagcaaacaagaattacccttcactgtagcaaaagaaacttaggttagttataagaaggaacttcctgagagttagcaagggaggctaagagtctcctcccttgagggctcttagatgggattttcttatctctttttgggatggcttatgtgagaccaagattaatgacactagaatcagccaaataacctgtttctgtgccttccagtactgtatttctgtgtatgataaccattacctgggtctgtgccttgtggatagttggatgattgggggtaagatttatttatttatttattatttatttatttatttattttagaagaaggcttgttttccatttgatttgcaagtaaatgccatagcagtgatgggctgaagccagctggagagttcactgttaaatgtttaggtttaattttttttggcaagtcggttgttatacacagctgctattaaaaagtaaatcatataaacttaaaattaataaattatattaaaaacaaggaaaaatacatagaactcactaccccttaataatttcactgcattttacttttatatatatgctcctaagattatttacttctattgtgtctgtcttactctcttttgtgctgctattacagaaaacctgagactggatccatccatccttcctccctccttccctctctttctacctctttctcgctctctctttcttccttccttcctccctccctccctccctccttccctccctcccttcctcccgccctccttcccttttcccttcccccttcctctttctttctctttctttctttctttctctttctttctttctttctttctttctttctttctttctttctttctttctttttctttctttctttctctctctttctctttccttccttccttctttccttcttttcttcctttcttcctttctttctctctctctctctgtctctttctttctctctccctccctccctccctctctttcttcttcggagtctcactctgttgcccaggctggattgcagtggcaggatcttggctcactgcaatctctgcctcccgggttcaggtgattctccttgagcagaatctccttcagcctcccaagcaactgggattacaggtgtgtgccattatgcctggctaatttttttgtatttttagtagagatggggtttcgccacgttggccaggctggtctcgaacgcctgacctcaggtgatccgctgacctcaggtgatccgctcacctcagccttccaaagtgctgggattacaggtgtgagccaccacacccagcctgagactggattgtttataaggaaaagaaatgtagtctcacagtctggatgctgggaaatttaaggtcaagttgccagcatctagcgtcctgcttcttgctgaatcttccttcattcatatggtggcaggcagaagaagaaaagaggaagtctgtgtcctcacatgacagaaaaacagaagagtgagaacccactcccactcctgcaagcctttttaatagcggcattgacctattcgtgagggcagagccttcatgacctaaaaacctcccattaggccccacctcccagcactgttgcattggggattaagtttccaatacatgaatttcaggggacatatttagaccacagcagcatgtgtatggtggaaataatatatactaatgtggcgctgcacatctcattccaattccacattcagtggcatcatgttggtggtttgaaatctgttgtgtgaggaacatttacactataaaaattggaagactctataaaccaggttttccccagagccaggagttagacatttatgagactacctacatggaagagagttgtgagagagaaggaagtaagggagggagggagggagagagagagggagagagagagagaaagaaaagagaaaagaaaagaaagaaagatgagaggggaggggagggggagagagagagggaaagaagaaagaagggaaagaaaaagaaagagagaaagagaaaaaggaaagaaagaagagagggaaggagagcgggtgagagagagggaaagaaagaggaaagaaggaaggagggaaggagagagagaaggagaaagagagggaaggaaggaaggaaggaaggaagggagggaaagaaaagaaaagagaaaagaaaagaaaaatattgccctagtggcttttttaaataccttctcaatattttttcaaaatctttttggggagtaagtattataataaaggcctttttgaaaaagaaaatgttcaggatttcttaagtccagaaactcttttatcttgaactaaattagctcaagtaaaatctgaattggtggtaacaattacgtatcagtccctcttttactttactacccattgttaagccaatgctgtccaatagagatataatatagtccacatatgtacttttaaatctcctagtagctaaattaaaaacaaagtaacaacaaacaggataagttaattttagtaatgtatcttatttaacccaaattttccaaaattattatttcactatataatcaatattaaaatgttactaaagtgtgttttttttgttttttgttttttttggtaatgtgtcttttctaatttggcatgtattttacattcacctcacatctcaatcagactagacacacttcaagtgctcaataggccatgtggctagtggctgccctactggacagtatatgtctatattcccagtgaagaagaggctgggccacagccatggtcattgcccatggagacttgcccactctcagtgcgcacagacagaatacattgaggttatctcacattagtgctagatgggccatggagttcagattatcccattcttaatttgtagatgtggggatgattacatttccgggaggtggttgtcttgtcctaagtcatacattggtatgctcaatggtttcaactgcatccaaactttggtttctgaactgtgtagtgcttaaggacctgatgcatgaatcaaactttcagctatcgtatctccaaggcttcctcatctattggctgaataactgggctaattgttaaatttcttggtgcctcaatttcctcatatataaaatgagaaagagtatagtatctacctaactgaggtgtccatatgatgatgttcatttcaaatacattacaaaatgcttagaataaagcacagagtaagtgttcaataaatgtttgtttgcttttgcacagcaaaggaaacaatcaacaaagtgaagggacaacacacagaatgggacaaaatatttgcaaactccctatctgacaagggattaacaaccagaataaggagctcaaacaactctataggaaaaactctaatctgattaaaagtgaacaaaagatttaatacatatttctcaaaagaagacatacaaatggcaaacagcatatgaaaagatgcttagcatcattgatcatcagagaaatgcaaatcagaactataatgagatattgtctcatttcagttaaaatggcttttatccaaaggataggcaataacaaatgctggtgaggatgtggagaaaagggaattctcatacactgttggtagtaatataaattagtacagccactacggagaagagtttggaattcctcaaaaaacttaacatagaagtacaatatggcccagcaatcctgttgctgggtatataccacccaaaaaggaaatcaatatatcaaacagatatctgcatgcccatgtttgttgcagcactattcacaatagttaagatttcaaagcaaactaaatgtccatcaatagatgaataaataaaaaaaaatgtggtacatatacacacgggagtactaatcaaccatgaacaaagtaagatcccgtcacttgcaacaacggggaagaaactggaggtcattatgttaagtgaaataaatcaggcacagaaaggcaaacttcacatgatctcacttacttgtgggagctaaaataaaaacaataaactcatggagatagagactagaaggatggtcaccggaggctgggaaaggtagaaggagaggggtgaaagtgataatggttaatgggtataaaaaaatagaaagaatgaataagacctagcattcgataacacagcaggttggctataatcaataatcatttaattgtgcattttataataactaagtataactggattgtttgtaacacaaaagataaatgcttgaggaggagacaggtaccccatatttcatgatgtgattattatgcattgcatgcttgtatcaaagtatctcatgtatcccacaaatatatacacctataatgtactgataaaaattaaaaataaaaacatttaaaagttcacttgtattgctataatataaagcaaacatttaatggtttgaatgaagagaatactagtgacaggagtaaaggggatactattgaacagttctcaacctgaaagtccaaattgctttataattacttgtataaacattcgtataagaatgtaaaagttatgtgtcagattgctatttcttgagtatttagataagagttttgctttctgtttaaaagagttatctcctgctgtcattattcttactgaagtggtaactttgtttatatttctaatgagacttaatgctgattcataatgatgtcaatttatttaaacttatttgaatttctaaaatttggaattctaaaagattttggaagtaggctgccactactccctccatcccaccttccaagtacccgtgagatgcatgcattaaaactcaatttccactctacattgacaagagaatttgaaaagaaaattgttagacaaatatatgtatacatatatacatatatacacacacacacagatttataacattcgttcatgtttactgaaggtttttaggatttagtaactaacttatgcttctcaaggcaattttcatgctgctttgtagtgtccatgtggaccattctttatttgatcaacacaagctttggcatgctttaaaggagcagtagttaaggcagttatgctggaatttctttagaagtggagatggcgttttcattacccagacgggtgttataattaatgagaacaaataccactggggtaaaattatgatgagactaaaattttaaattctgttggcattttaatattaatataatttttctcctaatgtgtatttcacacatggccagggaattattgaaaacattatttaatttaatcaaaaatatttaattcctaaagtacattcaggagtgctcatggtgcacttagagaatactttttgaaatttctataatgcagtctttacattacatacctttaaatgtctgggtgatactagccatgagaaagtaggttaacaatataaaataatgaggccgggcgcagtggctcatgcctggaatcccaacactttgggaggctgaggcgggtggatcacctgaggtcgggagttcaagacctgcctgaccaacatggagaaaccccgtctctactaaaaatacaaaattagctgggcatggtggcgcatgcctgtaatcccagctacttgggaggctggggcaggagaagtgcttgaacccgggaggcagaggttgaggtgagccgagaccacgccagtgcactctagcctgggcaacaagagcaagactccatttcaaaaaaaaaaaaaaaaaaaggaaaagaaaagagtggtgaaaagagtggttatgtcttcaaatgaatgtgtagcttttctggatagtttctttctctctctttctttcatccattctctctctctcctttctttctttctttctcttatgtatttagagacgggcttgtccaggctggggtgcaatggcacgatctcagctcaccgcaaccactgcctcacgggttcaagcaattatcctgcctcagcctcccaagtagctgggattacaggtgtgcaccaccatgcccagctaatttttttgtattttagtagagacaaggtttgttcgtgttggtcaggctggtcttgaactcccgacctcaggagatccgcctgcctcggcctcccaaagttggtgttttttgtttgtttgtttgttttagtggagtcttgctctgtcacccaggccagagtgcagtggcacgatctctgctcactgcaacctccacctcctggatttaagccattctcctgcctcagcttccccagtagctgggattacaggcacacaccaacaggcccagctaatttttgtatttttagtagagatggggtttcaccattttggccaagctggtcttgaattcctgacctcgtgagccaccatgcctggccgttcttttcttttctcttttattttgttttcctttcttttctttcctcttttattttgttttcctttcttttctgttctctctctctctccttccccccctccctccctcctttccttccttccttccttccttccttccttccttccttccttccttttgttctttctttcactcttccttttcagttaaatcttactgggtaacaaaccaacctaaaacttactggccaaaaatggcaaccattttatttactcacatgtctgtggatcatcactgtaattcttctggtctgaaccagctttgcttatcgctgcaaagttctctcatggcctatagtcagttggcaagtctgctctcaacaggttgattaaggataacttcattcagatcactggtggttggaaggctggttagtctttatgagcttctgttgtggcagtttgtgtttcttccatgtggtttctcaatctttagcaggctcacttgggtttcttcatacaatggtctaagaactccagagaacatgtgcttatccacttctcaagaatccacttgaatcccatttcctaatgtctcattgatcaaaacaatttttatatgaccaagcccagagccattgtgtgagaggattacctcagggtatggatacagggaggagaattatcacagatgacaaattattatgttttcgcaaatggactattccatataacatgaagcttccttgtttgaagtcactgatattttgagttctttgctagtgcatcatgacctaatctgttgtgactgttgcaacacctgaatcaataactaggctgctaagccaacaaaaatgagctcagtcatttttgtttgatatagctactgattttccagaagcaagaacactatttccttttcttttatgcacacatctcctttacatatgtcttcatagactgaaactctcagaagatagcatttaataacacaggaagtttgtgagaggtgcctggtacggaagagagtgagaagttgtgatagaagaagccaagctgctgtgatgacagctgagactctgactgcagaaaatgagagaagtcttggattttcatgtatgtcactcatttgatattgtagaaaaacaggcatcagagtgactaaaaaatctctcctcagttcagcagtcacagaattttctgggaatctggacaagcaacgtcccacaaagcactaagaagaaattttagctacaaaccaagtgaacagcaaatagctaagataatgtgatagccaacatactcagattcttagaagatattgagttaggctgagtagtagtccatcgtatgtatataccacaatttctttatccactcattgactaaaggacatttgggctggttccacatttttcaattgtgaattgtgctcctataaacatgcatgtgcaatgtagtacacgttgctttcaaatgtgtgacatggatcatgagaaaccttcagataaatagaacattgtctcaaattcctagtcaaagagcaaaactgatttgctacagaaaactggaaaattttagaaagcattgtttcttcttaaaaaggactaaaaatatgacttctaagaatgaagagttaaaaataatgaatggaagacaaatgaagagataacaagggaggcttggagaggagggacgagggagctggatgtgtggaggttgatggacaggctgcagctgttagcaagatgatgagtaaaagtgagctggtagatctttccccctgaaacgctacttggagtaagaagtgcctcgatctggcactaagacaaacactcccagaaacagatgcatctcagagtgggtaggaaacagacccgagagaaagcaatcagaatgagagagggaattctatggtacactttcctcttaccccattacctgaatgagtcatttcctgccatgtcactctacaaggaggtggcatcatcggtgaaggcccaggctggatgtcaggcatcagtatcggacttagacagggctaaagggagagatggcgataccaagctcaatcagatctacagctcccgagaattctctcctcccaccccctgtccctcacacctgggtgacaggtgtttaccaggagcatggaaatgagatccatgctctgggaagaggtataggaaggttatctggtggtgaggtggcaaatagagagttgtccctctcagagtttcaggattattttttttttttagatgcagccacctaatctattctctaaaatcccccagaggggtacaggctgggacctgctcttatctcttcacacaggcacactttgtggatactccccgggaaaacactacagaagaggagaacatatgtgtatatgtacattgatatttatatttcagtataagtatacacttaaatatatgtgcacttatacacacatatgtatatgtaaaaatactgtatatataaaaacagaaaagcaaaactcctggatagattatattgtacaaaattgaattaatatttcagaatcgaattttaaatgttaaatgaatatattcaaagtgatatggcaaggcttagtaaaatggaacagaactaagcagtaataaagacaattcaactgtaaatatgagttacgaaaaacagaagagttgtgctaaagcagcagttcctaaaatgtaatcccaggagctacaacattggcatcacctgcaaacttgttagaaatccacactcttgcacccaccccagatctactgaatctgaaactcctggactggaatccaggcatctgtattttagggtatattccaaggggattctgaggcactcaagtttgaaaaccactgctgtagaaaaccaaactgattgattgggttgaactaaaaaatggttagagataaagagtgattcactgagctggaagatagtactgaaaaacctatccaaaggcattaggaatagacaaggagatgaaagtatttatgtcaatgttaacaggcatgatggataaagtagaagggtcaacatccatataataggacatcaaaaaagaggaagaaaataatgaagggagggaaatagccaaagatctgttgaccaaggactttccagaatttagaaaagatcagggtatttcacataaatgtctatatttctgtctttctcttgataaattagaagatctggcaacactggcccacattgtcatatagtagtttacccaagctgactagcagctactgccttgaaattaggcattgaaaggatgagcatgtgggctgtggtcacagactggctgggattctacccaagctgcaccacttactaactgtgtaacttgaggcgaccttttgaccctcaattttctcatctaggcagaggggataaaaagatgcttgtcttatagttgtttcaaagattaaatgaattaacatatactcaacatagtgtttacaatgccaatgattacttttacttgtcataggccccacaactcactatacgattcctgctcttttcctatataaccttggttggttatgactttggtttctttgttaacagctctgagcctcagtttactcttcagaaaaatgagataataaactaccccaacctcccatatatagagaagtgaaataatgtttgtggacatgatttacataaaatgggaactcagtaaatgcttgaatttttaaaatttagtcacccatcttcacattctgtacaataattagcacagaatgatgtgttgcagccagcctacagtggtgcaagagaggcaattgctaaaatttaagaaattttgaggattgattgttaaacgcagctatccttaaaaattgaatcatctaatcttacaattaaataaattataaaaacaaagagtaaattctcaaaaattcatctcttcttagttttgtactatattttaccagaatctatactgttgagattaggtctattgtatctatataatagaaatactatgtgatggtgtcctattaagcatctcttcccaacttctggtcgagtcacattgtcttggtgggttgaaattggccatggtagaagaatttatcctgtggaatttgaagtggcaaacacttcaaatcagagttttatttcctcttgaacaagttgaaaatatttaccagaatagcattgttaatatccataaaaattgtttggaaaataaagacacataaaattatgtttattaccagaggacctcaaaacactgtgaagtactcacagtgaccataaaaaagatgactccattatagtattaattttccctgaaatttacaggctaggtataacattaaacatttaatatatttatccttaaaatggcaaagttatatatgtcctagaactctatgaaatacgctacacaaacatgtttttcttcacctataattgacccactgcaagaggcattccatttaccatgcttgaacaaagatttgtctttatagtaacagctatgatcctaaagttggactaagttctttatgcacattgacacaattctcacaacatccttataaggaaagcactattatttcccctaaagatattaaaaagtgatagcacaggtaagtcactctgaacatagaaatacaaggggaatttaaaggtttgcttattgttatgtaaaacccacccaaaacttggtgggttaaaaatcaacatttgtttctcatacttctggtcattggctgggcttatctcttgtagttcttctgctccatatggcatcacctagagtcactcatgcaaataaattcagctatgggttttgcttggactagaacatccaagatggcttcacttacatttccacgtggcttcattcagctggggtggccagaacaactagggctgagtgcacctttctcattccacatggtttctccaggcttatttacatggctgctgtaaagtaaagccaccagaaaggtgaaaaggggtgaaacagaaagctgtcaggattcttaagtaccagaccattcatgtagcacattcaattggtcaaagcatactacaaggccagcccagattcagtaggaaaggaaatggcagctgttccatcctgccctggaaagatcatgtctcacttcacccacgttttatttatgtaaacccaattatgcagccccttcttggtgagagaagcaatgatcatatatagagccccaaagacctatagggatcatctgtaactgataactttataattgtggagttccttaatgtttaaagttggattttctgttacatgcaactgaagcattcccaatgatgaagattatgtggaaaaacaagactatagaaaagcaaataaaaactgctcatatcagatatgtgtggtgtatactttatgtaagacatgggggaaaaggctgtctgctaaacaatcctttgggtagcttttgcttttttggtgaaagcaccacagtctagagtgtagaactcaactttgcaaactaagaaactgaagttgctaattcattgagggcaattccatctttcagcgctaaagattgttattccaactcataaaatggcataaaaataaaatgccaattacaatttataatgaatactataaatattgaggagacaggaactttgaggtaatcatgacctgtacattctggaatcagaacaagaggaactggatgaattaaatatttaacgacagctaaaatagcctgattcatctacattacagtgagaatggttttgtcaaaaggacgggaccaccaaaagtccattggctagccacttcccgcatccacttttatgtaaaggatattcttgcttgtgggaggggatatacccaaagatgactgatcatgtccttctcttccctggaaggtgctgagcagagatgatggtctctgtttctcttttctttctcttttccatgactgattaaacccttctgtaaaaaccattcagttggcatgagattgtttccaaatacttctctaaacagaaattcaccccgatgaagtttttaatcatctatgggaaaatgagaaaaataaagacacacatatacaaaccccgacacacgtgtttcactttgtttgtgtaggcatatcatacatcaccttctccccttcaacagtcatctttcctgagtgtctttatatatccacccgtcagttgttccttactgtcttgtccagcccctatatccacatgaactatgatgcaagtagattgtgattagagccccttagttggctgcctctccttttgcacagattataattgtttccaagtagattgtgattagagccccttagttggctgcctctccttttgcatagattttaattgtttccttcttgatctgttcttttattctccattccacaaacatacaaagttgtagctgtatatccatgtattagggaagatgagctgccaaacattccatctcaaatctcagcagcttaacataataaaaatttatttctcactcatgtaaacttctgggcagctctgttagttggatctcttccatgagctacctcggatactcaggctttttccatcttgtagctctgccatcttcaacacatggcctctgaaaccactacagaaggggaaaatgagggagaatcataaatggcagctgtattattagcttgtcctggaaaggtcatacttcagttcactctaatagcgaactctaatagtctgacccaaatgagttttcctgaggatttgagatctctaaaaataataatagatgaagaaagacacaaaatttcacattaaatatgatgtctatggggctcaagagaaaagctactggtgaattaaattccttatgtgatctctccttaaggatgtctgttttacttaaccttactttcctgattttaaattgaggcctttcttcaaaatactgctttttctaaattctatttttatgcattcttcttcatgatgaccttgtgagtggaaaaacaactccaactattttttctctgctctcacaccaatcaacacagaagacatctgtgaccaaatgtgtatgggtttttctccacacaccaagcaagcagtcaattctgtagcagacgccaacggggtatcctccaatttaattttgacactgtctacttgaagatagcgtcagaatccacaggttgagggctcggtctcacaaggctgcccctccttcagatgatagtctcaagtctaggcctctgaatgtctggcccaccagcttcaagttggggttccacaatacctcccttgggtttaattaaattgctggagcagctcatagaactcagtgaaacatctacttacatttaccagtttattataaaggtattacaaaggacatagagatgcatagagtggggtatgggaaaaggggcatagagcttcatggcaccctctaggaatctctatgtgttcagctatctggaagctccccaaaccctgtccttttgtgcttttatggaggcttcattacataggcatattttatttaaccattgaccattggtcaatgatgatcaacttaactttcagccactcttcccacctctccccagagtttaggggtggggctgaaagtcccaatcctctaaccctgccttgttattccttgttaccagcccccatcctgaagcaacctagagcctgccagtcatcagtcaacacactagcaaaaaacatcaccttggagattccaaggattttaggagttgtatgccaagaaattggatcaaagatcaaatatgtattttacaatatcacagacctctatcaattacattgcattttcctaaatctgatttattcagcttagaataacaccctggcgtaaagggttatagtaagttgttcaaggcagccatggacacacacaggtccagttgaaaaatccaatcagatgagttagagatacatcccatttatccttctgattaaccaatcagactggcatacatattcacatatatcttctaatatcacaaaacattttctaaaattgaacagtatcaaaaaagtctttcatctacaccaaggattagcaaactgtggaccttggggccaaacttgaatcattccctacttttgtaaatgaaattttattggaacacaaccacacccactaatttacctattgctatggctgcttttgtgctacaatggcaaagatgagtagtcgtaatagaggttgtatagttcacaaagtctaatatattcattatctggccctttacagacatagttgatcaatgcctgctctaaactatgtggagaagagtcatatacttaagggcctgaacagcaatatcgatgagtgaagtggaacaactagaatataaaaagcaatataattttggttgagccaagaagtattctcatactggtctaaaaatattcaattttaaaaacatgtaggccaaaacaattcacagcagattaggcccctagtcaaccagtttacaacttatgaactgagttcataagcacaaagaaaggcactcctccaccaccccataatgagcaaggctgcctctctacaaacaagcttggccacaagatcttctctttattatgtgaaataaggttacttcctttacatcctcaacacctcagccttctatccacacccattttaaaattgtgactgcttggatttttcttaaataggaaacttgtcatgctcagctatatatcccattgttgctcttccaaaccacaaagactaacagagacttgacatcacagcttataagggtttgattaaatgcttaccatggagccaccttatttgctggtccatggggggagggatgtcatccttgataataatttattatttgtagttctcatgtccttacttggcaaatttataactggcaaccctggattttattttatttttaaactgatttatgaaatcccaaagtatggaaaccactggcctaagaggcacataatgcagcagtgcaaggatggctttgctgatctttgctttggtccttccttagtgattttacatcatgtaagctctcaattgtccaaacttattcttcttatatctaaattcttagggaacttctcactgaaatcagaatttataactaaaagcacataccaaggagataacagctattgccggcccagtcttaaacaagggaaagctgaatcctagaatgttttatgtcttgaaggaagccctaaatccaagagaaaggccttgagaactatgtgtgtagaaggcagacatcagaaacatgctgcttgcgggacaggagagtaggaacttgcatatagtgaatgtctgccatatctatttcctttagcaaaccatgtaaagtagagctatctccaatttatgagttaaaaacttgaacaaccttaccatgattaggcaaacttgctcaaggttaacaagtcattgataaactcagtatgactgaggtaaaagcttttatttcaggttggagcaatagctaacctttctattcttttgttttattttgtttttaagatggagtttcattctgtcacccagtggcatgatcacaactcactgctacctccaccctccaggctcaagtgatcctcccacctcagcctcccaagtagctgggaccgtagatacatgtcaccatgcccagctaaatttttgtatttttgttagagatggggtttcaccatgtagcccgggctggtctcaaactcctgagctcaagtgatccgcctgccttggcctcccaaagtgctgggattgcaagcataagctatcgtgcccagcctacctttctattcttctttctttttcttgaaaaaaaaaaataataatctctaaagtttaaaaggtttagaaaattatcctaagtcagttgaagcaaagttagagaagaacccagtaagatatcataacatttctttaacggactcaaatcttcaagtgaaatccatccaggagtatgagagtgctgcatgtggcatacagaatctctgtcaccagtctttgggaaattttataaataattaaagaggttcctacataccaggaaagataaaaagtctccacattttcaaggagaaaaaaatatgggttagagcaaccagtgaattaaagaaattcctggaacaattttagatttggttattaaacagaaggtttatgaattcttagaaaaacaagtagtagtattttatctatcagttagtttacaggaatcagaaagttagaaggcccatcttgcagaaagaaaacgctggtgtgtgctccataattaaaaagaacagacaaccatatccttgatcctaatgttgactattcaaaattcagtctcaggagagaagctctgattggccaagcctatacccaagctgtgcttttgttctatcagggcagataaagagtggttctggattcttgggccatcatggtctgaggaaggaagctgggtttgcctgtctgccaagcctacagaagtagagggttacagttcattctctaaaaggaaatcagtgtgcattttggaaagaaaacaggattctagaccacaaaaatattggcaattgtcctcaacaattgaaaaataggttggattcatgacatacttgcctctttcatttttaaaaagtgtttttggacaagtagatgccatgtatgtgattcattcatcaaggtccttagaagagtttctcatgatacccttgcaaaaagatagaaaaatggaagctggcaggtggtatatgttcatggctggtagaatattaaaaccattattgaatctcagtgaggattgctctctggaccaagagtgctataatcttttccagttcaacattataataatcacttgagtgagaaaaataaaagagttaagactcttgtagttgcaagtgacagaaattcaaccagaaaatttctgaagtgaggctgcaagcacagcttggattatgaaacttgaccaatgtgataaaaatgttgtccttttctcactgtctcttggctctgcttcctctctgttgcctttatgctataaaaccatctccatatggtgttaaggatggctccatgactctattcttacattccatcaggttggcaacttcagacaaggaaagttttcccagcagaagccctgagatgactcttattgtctgaattggtatatgtgttcaatcttgaatcaattaccagagtccaagttgatgaagtgttccgattagtcaagccaaaatcacatacccacccatggagccagggggctaagtaagctcccctcaaaccacctggataaagagaagagaagacatagtactaaaaaaaattgaggttttcttacaaaaaaaggggattttgaatagacaaaaataatgaacatcttttaaaacatgattattcagtttagaggtggcacaaaactgagagatgtagctattaataatattgacaggaagaaggttcaaaagatttcaataagctactggagtgggcttaaactaacacaattaaatttaatcagaatagaaggaaagtttaacattgacatcaaaatctcagttacataagtaatgttggggctattacttcaatgccaaagcatgaaagttttagttgtctacaaattcaattatttattaaccacctaaaaagctaatgtaattctctgctgttttacaagagctatactgcctcagtgatcattgtcccactgtattatgcactgcttgaatatttctgggtgtctattttcaatgctagtcattgacaataaccatataaccagaggaagatgcccacaagaacagacaatttattgccaagcaagttatataatatatctaaagtcaaatagaaacaatattttttccataattcacatcctgtttattatagataaaagttgactatatcatatccagagtgtatatacagcatccagaggtcaacctagtttcttcttagacacttggtataagcaaaaagtaagtaagccttggctaagcctttattgcccaggggcaaagtaatctttaaatatatgctctaggaaacacacatatcaaatagggaatcctttgtgcttgatgtaaaagaaacaacattaaaatgtctttttaacatagacacacataatatgtatatatatggataagtatggctatggatatatacaaatacatacaaactcaaacacaaatacaaacaaatccatacatcagtgtatttgtttcacatgactgttaggaaagtatttctgcataagaacaactagcacaaagtcctgaaactgttctaaaccatggggaaggactgcgctatcttaaatgttgtctttttgaaactttctttagtgacacattaacctctgtgttgttgaccacagcacagaccagttttcctcacttcctgttatcttgttctcatttgatagtgaggctcagagggtgtctgaggggagggaacattttggtacaaaggcagttggcaaacaggaaaagcagcccccttgctggttacaggttaataacgacagcagggagaggagttccttagaattcccttgagccggtcagcttcccttgaggtcaaaaagtcctagggcagctttaatctgctgtataaaggcaaggaaaagtcacttctggtttaccgtaaaacaaaaagagctccttattggatcagaagctgcagaaatgcttatagtcaagtgggttctgttggttgtggagagctgatgaggttagtttgttagaacacactttgtgaaccataaaatctacagaagtaatttatagttgtttgccaaagggatttttctaggcagcttctatatactacatactcttttaagtacttaagttaaattttaattttaacaacattagttgaaatcacggtggttaagtctaaaacatattgctttctttcttatctttttaaataaaatatatttgaccaaacagtctttcttatacaacctaatgggatcatttatgaacatcaggttttgaaatatggtccaatatatactaattgccatttattgaaaacctgttgtgtgccaggtattgtgctaagccctatgcaaaaaacttagatgatttaatctgcaaaacaacctgccaagtcagtgttatgcccatttacttattttacatataattaaaccatggtctagaaagcttaactcacatgaagttaaacaaccagtaaatagtgcccatagaagtagaatctagttgtgccaaaatgcaaaatccaagcttaaaatcaccagtgtgtaccttacagtagtgctctcagaagagtgttgtgttggcaaatgtttagtaaacagctctccagaaaaagtgtatgtatacacacacactacacacacatatatgtgtgggtgtggtatatatactttgtaataaagtatatatatgttttattataaattttactgatataaaaggaattaacaagttagaataactaaaatacataatttggtattataattattataaattccatatcatcagttgaatatcacagaatacacttgataatttttgcctaattcttttattgcagacagctacaatagaaacttttagaaggaaacataggagaaaatctttttaatttggagcaaaatggacatttccgcaaagcattcttagacgtgagaccaaaagcatgactcataaaagaaaaaataaattggactttattaaaattgaatttttctttttgcttcaagagacaccattaagaaattgaaaagataagccatggattgtgaaaattatgtgcaaatcatatattggacagaggacttgcacccagaatatacatagaactctcaaagctcaatattaagaaaacaaacacacacttaataaaaactgaacagatttgaacttatatctcctttgagccaaaagggataatagagatggtaaatgtgcacatgaaaagttgtttgacaccattaaccattaaaaatacaaattaaagctgtgataaaataccactacacacctattagatggctaaaataaacagtactgacaatatcaagtgtgacaaggatgtagaaaagctggaactctcacacattgctaatggaaatgcgaagtgacacagcagctctggaaaatagtgtggcactttcttatatcattaaacatacacttatcaatgactcagccgtctcactcctaggtatttaccctagagaaatgaagacttttatgttcatgccaaactctgcatgtgaatacttaaagcagctttatttataattgccaaaagctgtaaacagcccagagatacttcagcaggtgataaagaaactgtggtacatccatacaatggaatactactcagggatgaaaagaaatgaactattgtacctgaaacaacttgaatgtatcttaaaggcattctgttgaatgaaaaaaagtcagtctcaaatattacacattatataatactatttatataaaattctcataaagagaagactataattctcatgaagagaagactataaggatagagaacagattagaggctgccagagattaggtgtagttggaaagtatgactacaaagaggtagcatgagaaactttttcgaggtgatggaacttttctgaatcttgattgtggtgttggttatattaatctatatatgtattaaaactcatattactatataccaaaagaaaaaaagtaaaagtcaattttactgcatgataatttttaaaattgaattgaatttaaaaagttaaaatttataaaaatttttaaaaagtcaatacataataattctgtgaggttttttttttttttttttggtctcaattacctctaattaggttactttggtagtctgtgatttctaatgaacttatcaagaataagtatccactttgcttatgtcctttaccatttcgggcaaaatcacaacttaattcgctccactgtacatgaccttctcaagtatgggagagtgtgttttggttcagtaccaagcacttcaacaatttgcagggctccttagtaccctataccattcatgaaattcttaccgtttgcaattctattcttacaacctctgaaactggtcttaccatctgaccatctcttttcctctgctgttgactatatatagctccaaattatctcactaagtcctatatagcccctttggaccatctgagatagcaagagaaggcttaaagcctacagagggcgctccaggctatgtggtctccagaagtagaagcccctctgaaacatctgttagatgtggtgtcagtggccaggtgatgggacttaccggacagaatgtctgtgtctctactgtttcactccgattagtaagaggttcagagatgataattcattacgctgcttcataatgttcttcttaacattagtgaggatatacaggagagattgttatccatacatattttgcaaggtgaattataaatacttaaatacaacagcttactttaaggcaagaaattcccaatagaatatccactagcataaattctggtttcttggctgtcctgcatttctcttcaaatggttttgaggacacctctatttctgaggctactcctagtggtttccctgtagaaaaaagcaacctggagaattctgtattttaaaacacaaattgtaggcagtttagccataagagtgtaatcactgataagatactttataatacttcagtgaacatcagtgtggtgccaccagagttgggggaagaaatttctcctagacccagctacatctggtgtcccacaatcctcgctgggatgaagcacacctgataccttcccaggggtagttttagccatgcttgctgaagggcacactggaaagacctaacattgactcaaaacagtatctttatcttattcagcaagggtcgcctgtaatatccagtacttacagctgatgctgggaacttctgtctcctctgtcaggcattcttatatattttaaacctgaagctggtgtaatcaccaatcatttttagtgtttctgtgttccacacacattctaatcttgaaattctcaacaccaccataattagtaccacattcagactatgagactgggataaactggcgttatttcagatatctcttaaattgctctctaaccaacaagactcttagaacgtttcccaaaaggtagaaaagccctttgtgcttagcccacaacccagatatgggaaggaaactacttactcctagctaatagctctatcctccacctctcatcccattctacgggcagttggggaatctgcaaagtccatgctttgaacactgaattaccagctctatccctcctcctatttccaccctcactgctcccaattggttgggttggatccagcctggaacttcaaaccttttccccaaaagctcatgatccatcttttctcaagccagagaaggatcgtttgcatgggtgaagttctccaatggccttaattcttagtgctcacaatagtgaaaggaacttgggtgctcttgttaagggaagattctgagcttatcttggagtttcccctagtcttcttgcagatgaagctgataggtttctgttacctaccatcttttattgggctcacaccacaagatgcctagtttttttattatttctgcatttgatcatgcagcctggtcatttgagactccctacaacacttgcttgcttttctcccaactttctatcttccatttttctctccatccctccattcccagagctttacacaaaaaagtgtttcatatcattgtagactggaagtttcttcatcttctctctgctaggtggtcaagactttatgatgagtttacatgaggtttttttcatcggctagggatttgttctgctattggaagtcagtcaagcagaaatctgtgctaagcaagacagagtggacatgagagatattctctttttgaacaggtaagatttgaaaccttaaaaatctaacctgctgagcagtatagagccacagctacctaagtgctctaaaccttgaacttctaccatgcacttactaatgaaatagagaagtagtaataaaaattgattttaatccttttaattctcagatataggaagagaaaaccctcatattataaaattttctgataacttcttgttttgatgctttctggcttggaggactgaaggaagaaaattagccatatagtcaacttcagggaaaatgtataaacctagctttttggatctgaggtcaagaactgtagttgcctgttactactttacttggcttaattctctctggcctttgtaacatctaaatagtgttactgtatcagtcaaagtcaaactagggataagaaaccacttgagtatttgaaacagaaaaaatacaatacaagaaattagttactcagatgatggaagctctggaagccacacaaggtacaagaggcaacccgggaattagcaaaggttagaatcctctaccacctcctggctggaaggacagaggaaagaggtggttttactggtgcttaaggacggggatcacatggtgaaagatagaaccactgcgagaaagagctgaaaccaacaagaaaatgcagccatggcaggggtgctgcccaaaatggagaaggggtaaaagtgggggagaaatactattatttttttccttcctctcactctctggtctcttagtagtggctcccatgggccaaacccatccagaagcaagataatgtgagatgctggaaaattcatcctgatgggatcaacctccttcttccacaataaagagcagatgatggaaaggataaatggagaatctgtgggaaagatggcctaggactagcctggctagtggagacacatcacaaatgaagagatggttggacctgattttaggacttctccttcctgtaatggacaatttgtaatcaggttgggaagcgctctgccacctgcaggagctaaagtagcagccatgggaaggacataagcagtttgggagagcttcgtaacagtgacttcaaattctcagccttctctcatgaaccacctcaaggcaatgactctctaagctgatgtagttctgttgtgttcctgtgtttgagacagtctattctcacatttccctagtgtgttctgagtcacagttcattttattccctgcctgcatcacttgcttttacactccttacaaaatcatatacttctggtacccaatggtgtctagcataggttgcctattgtaaggtgtctttccctcttcccagtgtaggagccagaatcttttgttcctctcacaagcccatctgccactttacccagtgatctttgatgcctttcctagtactgtctaactctctttaaaaatacagaaacagttactgtggaattctatgcgatcctccatggcctccttcttccaataactccgaatggaaattcctgtgggggaatagcccaataaacacaattatccagcagaagaagggctttctggttggatcagtcaaagttcactcaggagcacagaggtcattccaggtactcaggtagaaggaatttaatatggggaactagatacagtggtgttgaaggtagtaaaaaaccaaaggccaataaggcaacagcttgaattcactactactgctagtaggacaagagggataaagggaataattggagtaattagaacccaagaatcagagccatccataggagctcattaatagcagaggtttcctgttgggatcaggaaccaagctggagacacagcccctgccagagcccatgcctgaaacacagaggaaaaggaataaaaacctggcttcttccttctgtctgtcctccaatctctccagtggttttcgttgactaaaccaagccagaagccacttggcaagagagtccaggaaatggagcttgcaaaggaagggcaggggaaggatttaagagcaaaccaacaaataacccagcacactggttgcaatatttgttctcaagtcttacacttttcggtagttctgagatttctgctgtctgctgccaaaactttttggctcctgaggggtccactcttgacaccccagcatcttcctgctagtggtttaaaagacatgcagatgcagaatgtcatgggcctgggtctagcctattggtctgggttttttttaattcaacgttaagccacaatttagtaatccactgtgacctctaccctccatcccctactcctaattgccactcctcacccaactatgaagatctattcacagccataatgtgggagggcatattggtggaacgctcatttgctaacagagcatgtgtgcaattgtttatgaagatttgtacattattgatatatctttcacttttagtcactgggtccaccaaggtacttctatagctggtagcttactctttcttctaccactctccttcatcataccaatattttttcctttgtttaccttcatggggtcttttatgcttccttgccagttctaaagcatgtgtgaagagcagatacatctatgtaaatggtttatatttactgtgaaaacttatgaaatatttatgaattattaatgtcgtttctagggccacaataaatctctctttttctctctctctctgtgtgtgtagtgtgtgtgtctttctctctctctgaagtgtaacccttcaatatggtataactttctcagactgattctgctactcactcaggagggaatgttaaattctacttattttgcttcagtttgtaaactttctagtgttctcttttttcaaactggattgttagattatctgagggtacccactccctttgttcagagcacagcatttggtgggctgtaaaacagaagagctccttcagacttgtttgacaaatgagaggaaaggggcaatggtggcaggagcttgtacagataaaaaggctcttcaccttgggccaaaaggtgctacttggcaccacctccacttcctgcttttgctcaggaaagaaatctgacaaagcaggagacagtccttgccttgccttcctcactcacaacccccttttttgagaactgccatcttgttctcaagatgggccatatactagtctctatttctatttctccagctcttgtccatgccacccagacaactatgatggcctctccttagttattaccctgtagattagttttgcattattggataaatggaatcctatagttttcgtttggaataatttagtcttcggaatctcttacttaacatgatgcttgtggaattcaccatgtagttgcatacagcaatattttatttattcttttgctgaatattattccattacttttgccagtttgaatggatttctttcttacagtcaagtaggccatgactaagggagataatgaagcatggaattgtcttttccagagaaaccacaggcatggaataagaattccctgaggaggccttttctgtcctttcttcatcaagctgcgacattattttcatattcagagaacttcagagcaacaccgagtttcgctgagtgggttcagagttccatatggcagctgtctcagttcctggcacgaggccaaaggatgacagttcttatcttctttcatgttcttttgcccaaccttagggaatatttctttaccctgtgattgctcatatctgaaaatcttactcacactctacaatcttccatcagcccaatgccatgtggtgttaaccctttgcatgctgcagtgttgagctgcaaacctgcccttttcttgcagtaatccaaagtgcccgtaaagtcttgaggcagacaatgttattttgtcatgtatgttcatataatatcagcaaatcattcattgtgtctttgtctatcttccagacatggtggttgctttgtagaatcaaaatttctgttatcttttttcataattagttaataaattcaagttgagctaaggagccaggtgaagccactgtgatttgggcaaggttcccatcgatagacatgtgctttcagacacaagatgtgctttcagacatacaattctgtttggccagagtagaatagaatgggtggtgcacactttcattatgtaagtacaccctgtttttcccattggtaataatatcttaaggagcgcaaggaaattcaggaaggaacatttcataatgtcaagaatacctactaagtaaattattctttagaataaatctgagagatggattgtcataccaaagccaatagaaactgaagcatgataatgtcaatgcatattttccctgatatactgtagatccgtagttttaaaagcctgcttttttattttgctagctgaatctcttttatcttgctgccactcttctcatgggatgcctcaaaatcctacagactcttgcctggcaatggggaaaaatgagggtgtttaccactaagaaagccaattaaagaagtaactgatggattatccagcccatagaccaaacaaaatggacgttacttcatgtcttcaaatatctaggcactggaatcagaaaatgaactcccaatcagacttccctgcttttcctgcagggaaaatgagatgcaaagcagagtcagagaaaaatagcaaatggccatttgtctgctgggagataaaaatcttactcagaggtcaagtcacattcaaactggttgatcccatggagactgactctgtcctgtgggacatttcttctctcctcctgtctctacctttcttttctctgtctctcccacccttcctctttttatttgcccccactcagggtgcagatacaggttttgtaaggctgaagtttaaatgacagtcaggggccagaggaagaggaagatattattataagtagcaatgaagtaaacatttatctaaaattaaaaaaaaataaatcaccagaaattgcaaatgtttaaatgttgaaagtccttcaacattattcaataccaaaaaagttacaccatgttttttaatgagctgctttatactttttcctacacgtttggctgtattccctttgattgccttttgatatgacaatggattttatatataatctttaatagaaaacagaaagataatttagtttttgggctagcatggttgatcaaaatctattttttattggctgaaatgcgtaaaatgcaaaaacccacctcatacacaagcgcacccatttttcttttagtttttagtactgcaacaagaacatgccctacaaacacagaaattgtgatatgttttgtttcacttgtttcccataaaaactgtacggtgcatttatgattgtatatgttgggaaattctgtgtattctgatagcagagaacttgcattttgacaagaactgaatgctccacttataacttcacaaactgtagactagcttcagagtcctaccttcgagccttgtttcttgtccaccacttgtacagctgccatgtcaagtaccacaggccttattcatgccctgatacaaggtggacattgcaccttcttgtcaagacactggatgagtttacacagcaggcaacaggagtatttctggaagccattactacactacagtggaaaacgataacattacacattatacatgtgactatgaaccgcttaactgtttccactaaataataagtaaatgcatctctaattcaactttcccttctatatatcatcccccaaacactcacccccattcaacaacacctaacacaaagggaattgtggtggagcagaagttaaagtggaaacagacagctgtcttaattgattatgatgcaattttttttttctgaaaatgtttcaaaatcaaaagatgataggaattatttttgaagtctgtcccagggtgtgggagggtctgtaggaactaggtccctgacatttgaacttcctggcaaagcttccttccttaatgctggcaatggccaacttagtgtctggtcttctgctttcccaacccagaaatgtgaagcttctggttgctgaggaggtcctagccctcaggtggaacggtgccatgtgtcctggagcccagatactgcctgggcagagaggtctgatcacacacagagatgggtgttggcctaggctttccagatgaaaacagtgtgactgatggctactgaggtggggctttggaaactgggtcctttcagcccatggatgaagcctgagatgtcatgcccagtgtttgaagcttacagacccagctcaattgactaataagaagcctgctttgtgcatttaactcttcggtgtttcctccctccctccctcactcccttcctctctccctccctcccttcctctctccctccctcccttcctctctccctccctccattcctctctccctccctcccttccttcctctctccctccctcccttcctctctccctccctcccttccttcctctatccctcccttgccccttctttctttcctttacttccttccttccttccttccttccttccttccttccttctttccttccttctttctttcatttaatcatcctgataggacactgaactaaaagcttgaaccctgggtttctgttctgatctaccactcatagctgtgtgtccttgaacaatcccttcatgcttctgaacctcactttcattatctataaagaaagcaagtgaacttgacagtctcttggtttcctgccctcagtaacatctgatttttctaggtctgattagtatgccaaatcacatgtgatgttgaaatgtgtgaggttatgttctcaccactaagtcattcccactgaatctttataaatgtaagctaaatattaagtaagtagtgtgaacccaggattacacagttgcttcacatggatatctcaggtaattccccaacaactaatgttttcagaaaaaatgtatctgtcacttgagatgtcccgggtactgtgaagagctcttgcaacaaagcccacatcatgtaagtaagtcctcatgaccaccttaatagttgtgtgatattattgtattccttattttagagaagaggaaactgaggcacaggaagtttgagtactagagtgtcaaagtcatacagctagtaagtgtcacggtcatcacctccaattatctctaagccacagatgacagcaattaaatgatttacccaggattattcaccctagatggcagagatagaaatagaatttcattgcctctagataatgggacagtataagaaaactccactcacttgaagttctttccaattgacaaatgtagttggcaatttattaccccagagaaatactttttccccttgcttttagatgtatctgttgttaaaaggggggaacaaaagtatcaattttgtataaagagttcggaaataatttgagttttacagggtgtcacttaatctttgaatctggttttattcggtaatattttgaaaactactcaggccaaaaaatccggataaaactactgtcctggcaccaaaaatggaagaaatggtaactgctgttccctgcatcctaggcatttccctgggcttacatagaatttattccaatgttccaccaggtggtgctctggtgaagacatggttctcaggctctccaaccccttgacgttatgcttggaaatattttgagtagattaagtcatttctcctaagaaagaggctgcccagtaaaaggaatatgattgcccattttgccaataagacacaacgtgcacacagagaaaagtccaacgggaatcctcagataaaggacaatcgtccctgaaaaagtcagtcccaaaacatctaagaaggtattagaacagtggtcttggctgagtcttatgggactagaatcaggaatttggagcttgcgtttctgctactaatctatgagtcatttggagaacctcattcttctctggactgcagtgtcctcacctataaaatgtgtataagtgtactggggtggtggggagggggttagactgtatcagccttcttctacagggggctcataagcccaatcaatggtatttgtagtccaacctcctgaagctgtgaaaaaaactttgtgtgtacacatatttttctgggaagaaggtccattgctttggacagatctaatcagaagccaggagtcctaaaatgttaacatctggatcagatcatttctaaggtcctctccaagcttcagtattctatgatgttataatctttctgggaaggaacttgtggctgtcaaattaattggatatccctagctatgttctagccgcatcctttcttatgtactctctaatgattttgttaaggcagtcacacctaagttaacagagtcctgcaacaccctctctactagattaggtggcacatcatgtgactgatgtggttcattagggagccaagagagaccagaggagctgtgagagcaactggccagatcccacaggagctcagtggtggaagcaggtgctaattaccatcctttggaggaacaggatatgcattttttgggagtgggtaagaatttctggttagacaagctccaaattctttggcctactttgaaggcactgcctgttccattggctaggatgagattttgtttcctgatgagcaccagctcagccaggaaggaaggctcagaaaaggaggtgtggatattctttgtggaggaattgtcatgcaaataaaggctccttcccaacccaaggtgtaactgtgagggagtgtcagggtcccacctttctggctcaggaaaaacatatctcttacttttttacaggagtaggtttggtagctgagtaatgtaattatatagattatagattaccaacaaacactgagatttcaacctgttctggatatatattatttgtgaggggaggggcttggagaaaaagagcaggaatattggttgggatgtagccaatgggagaaccccattattaaacagagagtgcagtccaagcattgcacccacaagaggaattcaatgtagggagatattgggagtagagatcagtgcttgggagagaggagctgggaaagaaagcaattcctccaaaggctctaagtcagcgtgttgtccagaacggaaattgagtataggaagagagattctttcttggactttggaatatctagtctggttccttttcagaatgatcagaccaccttccttacctattgcctgggccaatggttctcagccctggctctgcattaaaaccaccttttaaaaatttggcaatctctgggccaggtgcggtggctcaaacctgtaatcccagcactttggaaggccaaggcaggtggatcacttgaggtcaggagttcgagaccaccctggccaacatggcaaaaccctgtctctactaaaaatacaaaaattagccgggtgtggtggcatgtgcctgtaattccagttattgaggaggctgaggcaggagaattgcttgaacctgggaggcagaggttgcagtgagccgagatcatgccactgcactccggcctgggtaacagagcaagactctgtctcaaaaacaaaaaacaaaaacaaaaaacttaatgatgtcttggtttcatgctaaatcagtaagtcagaatatctgaggttagagcctagcattgctactaaaaaagttatttccttgtgactttaatatgctgccaaggttgagaaccactggcctacaccaatgatggaaaacatggaacatgcatgctgataaccccctcccaagttcatggaatgtgtttgtttagtaattacaacattctttgtgcactacagaacttgtgcacaatgcctggaacatagcagttgctcaataaacatttattaaatctagtgatctttggggcaagatggggtggtgatatctttcacttcagcacccattttaatttattccttttcattaaaaggacagtgaaaaatcatctttttttttttttttttagacagattttcacttttgtcactcaggctagagtgcaatggcacgatcttggctcactgcaacctccgcctcctggttcaagtgattatcctgctcagcctcccgagtagctgggattacaggcacctgccaccatgcctggctaatttttatattttcagtagagacggggtttcaccatattggccaggctggtctcgaactcctgacctcaggtgatacacccactttggcctcccaaagtgctggaattacaggtgtgagccaccacgccccaccatcctttctatttacaattctccttctatttgaagtatgcttcctcttttgttgttgttgttgttcttttctctcattactttcttcctctcctttcttggaaagatacatactaattccaagaagttagggtggaagtaaacaacatggaaggaagaagaagaacagcactatcgtagtttccttgattattggtctcaggtgatgccttggggagcacaaatcccaccccaaccccaaagagaaggagctctgtcatggatctcaagaaaaccaggccaacccaatgaggcccccttggcccaaggaggtggcaacactttcagagggatgaataaaggagatggaaataaaactgggacatgaaaaagcctttttcaaaaagaagctctcttttgttcccgcaccatgttgtcatcagtaagcaggcttgcttatggaatgccacgatggatccagataaagaaaacagcctgtgaagcaggacaggtttaccccagatttcaggggagaggggtattcctcatcccatgaggatggtcagtctagagggttaagaacagtgtgtggaggaaaaagaaagaataaattccttagggtatttttatcataagccttcagttaaaggaaaaggaaatattaaaacttatgcaagggccagttccactctccagggtctcagagctgttcctagaaatagtgtgcatttttccttggctacataggtgcttcaagacattttcttttcatacaattatcacagtttattagcatgtatttgtgtattgcctactttattattccattctcacactgctaatgaagacatacccaagactgggtaatttataaagaaagaggtttaatgggctcacagttccacatggctggggaggccttacaattgtggcaggaggtgaaggaggagcaaaggcacatcttacatggcagcaggcaagagggcatgtgcaggctaactgccctttataaaaccatcagatctcatgagacttattgactatcatgagaacagcatggaaaagacctgcccccatgatgtagttacctcccatcaggtcctccccaccccacaacacatggggattatagggctacaattcaagatgagatttgggtgaggatacagccaaaccatatcacctaccttactcattagtctcttggttcaatactgaatccccagtaccttgaatattagcacgtacaggtcactcaaaactgtgtgttcggtgaatgaataaattgcacaaaaattcccacagcatttattgtccaaagaggcagagaatgattggcagtaatttattattatcctatttatttatatttttatttgttaaatcagtcctttgttaaggcgatttttctaatttgattaaaaaatttatagcctatgtgtgatgtgaggagagacataaaagactgggtgtgtcctatgaagcctctcagagctcatagtctagaaggagagataatcaatgaggcaatattgaaagcatcacttaggtctcagggtactctggggccacacagaaacatgccttcccagacaggcacagcttccaagaggatatttgggaagaaaactatggcaaacaatgaaaaccaagggaagggtcagctgtagggaggagaatgcttccttcctgtttgggaatgggtacagaatggatcagaggggtgagcaaaagttggggggattagttaggcaactggtgcaataaatcaggagaaatggatgaagacctaagatcaggcagtatgtggaaattgtaagaagggatggataaaatgtgaaggaaatagggttgagggcatttgtggggtgatggaaactaggagcagaggagagactaaaaaggagcatttgcagtagtgagaaaaccaggcaaagaggagttgaggagttaggaaactaaaccagcgtactaaacagaaggagtggtccgaagtgtcaaacgctgttgattgtggcagaataaacagcagtggtgaaatgaagacaggaggtaggttataggtgagagaggagtgaagtgctaatgtctctttctgtaatagatgctctacctagaaaaaaaaaaagagagagagagagaggtgggatggtagctagagggagatgtaggaccaagctaaaacttctaaaatggaaggaaattttcagttgtgtaggcgagaggaaggatccagtgaaaagggagaaaaaagaggaattgggatatgtgttttacccttttgctatggattccacctttaaacacttttgttatcatcttcaatgacttccttctgacgcattgttagactctcctgctgaagcaagtgctcaatcatactgcaagcctcagacagcatctaatcaaacctgatcattcccacttagctggcttctgatagttgggttactttatctcttggctcagagattcctaatttgctgttcacagatcctcatggggtccacatataaaattgtaccttaccataattcatttcataatctatgtattgtttcatgcttttgaaaggatatattggcttccccagtctgccaaagaagtccatgacacaaagatacccccaaacccttcatcgatatactctaagttacagctatgacaagctctgtatttagaaactaacaactttctcctgtttcctgtggatcacccacttaccttctctgttccagatcaatgaatcagggaaattaatagactggaaatgtcttctaccaattattcccaaagatacgtaataatcacctcgagaaatagacaaaagaatagattccaaaatcccatattacaaaatcccattctgaaaaaccctgaatttagtacatttaaaaaggaaaccaagaatctgcctttttaaaacaagctccttggctaattttaatgcagatagcctttggacaacacaaagaaacatatcacttatctttccctggctttttttaaaatgtgtcctaaatatgattaattctattgaacatgttcagttactttgagaaatatcaaatcctcaaacttaaatcttttccaagtttccccaaagaaatgccgccatctctaatctttactcacgtgaacaaaccaatctctgttggtatttgtttaaacattttgagaggctcatcacatcacagagaatgacatacaaatcacagcacatagggaaatggctgtgtgtatggaacttttcagaatggagggaaaagggaacaatattcttagagaggtacagttttaaatttttggaaatcgcaaagcttataaatataagaaatgagtttaagggaagataaaatgtaataggtggtgatgcggccaggaaaaacaaaaagcctaaataatacaattaacatttttttttttcctgtgaagcagccacaaagtaaaccaggaatttcctctaataccaaaccatcagatgggttttcctgggagttacttcccacacctgaacaaaatttcagctgatcccaagtgacacagtgtgtaacgatatcccgctatgaggagggcccatgattgcaggactcttggcagtactagtgtgagttgaaacaatgaatgaatttgccagatctgatcaacagtttcaaggaagagtggactcactaatctttgagatctgggaaaaccttgagtggggccttcgtgttcctatctttctgagttgaagaaggaactcatccttcatctccaagtcaatggtaccagtggcttctattcccaggtatgtcaaattcctgccaacaaagctaaacagaacatttcagcaccttgacccttactgaggaatttttaaaccagggttagaagtggagctaatctggacagaggagaaggtaaaagacataaaatctgtctccagtgtctgcacttcaattaaaacccatatttgaatcatgaagtaagttgggtctacgacttctcaataataatgggtttcaataaacttgcagagacattccagaggctctgtcaatatatcaatcaatctataactcttttggcccccaaacaatgtttatctatttaactgtgattaccagatgttttggttgatctactaggtgcttgacagcagcttttttatttatagaaaaaaaatcaacaagagtgtggaatattattctccacattcaacaaaaccattttgctgtaatgacagccactaatggacagcagccatcagttaaataacatcagccaatgatggcaagataatatggggtacagttttcatgtgagtctccaatttaataggggttaaaaataatcttcaaggtcatcatattggtagcacttttttcttatcagacactgggagtaataatttatgaagcatttttgagttcacttgcacatctgctcctttggaccagggaaagctctatgagaaacacattctccccatgttcttatagcacaacagggttcatattttattgatgggtttcttaaaataatggtaataaaaatataattttaggcttttccagaagacacctgattactatccagtagccacttgctcatccttttctcttgcctgcagagtcctccccttattatagatatggaaaatgccagataattttttctcaagtcatccttgcaaataagttcaggtcatgtgaccataacccagccaatgagtactgagggagaagtcttcacagaaaatccctatagaaagattttattttctagtaagaacctgatgtttgagaagtgattccttacctctctgtctgctggctgtacagccagttgtgtgagaatatgtgctcataattgtggcagccaccttgtgactatgagaggcaaaccaagagatggacagtgaagtgtcccaacgtggttgatctgctcaagtaaccaactctgaaaacacctgtgtctgggcagcttattaaatgcagttggatatctgttctttgcagtcaaagtcttcctaacaatgctttactaattcattttaagaatgtttactgagtattcactaaaggctagccactgtgacaggcaccgggctatcatggtgagcacaacagacattatttctgtactctagggattctcacctaggggacagacagaagttgattagaggctatctaatgtcatatttagcttcattgcgttgggagtttgtggttagagaaggcttccctgaggaagtgatgcttgagctgctgtctgaagaatacatggaaactaatcagatgaagagggatgttctcactgtgcctttgtgaattaatcaatcaaactatctcctgaaatcaatcaaattatctcctgaaagccaatgaagtcaacaaatagaatcacaggagaaagaaaagtcacccccagttgtcaactattcagccaactgtctcccaagttagtgatacatcaagtgttgatgaggaaggatttttgcagactgacagcccaatccttcttcccgtgggcccatgtggacaccttattgtgatcgttcttatacatacaaaacgtcgtagtttttatggtagctgaggtcatggagatcagttttcatttgcttattgtacttgttataaatggtctaataaattatctctttttgctaagaatttccataattggtttcagcctgagggcacgttttttgtttttaaacattcagccattttgatttatgtgaatgtgaaaaatctacattttttttctgtgtttaatccaatctacagaatattatttagcgcaaggaaatctccaaaatagctgaagcttttcacttatttagatttcaccaaagagtccccagggtagaacgaaaacatctccaagctagggtaattttacaaaaactgcttagagttcaacagctatttctgtactttcagaattctgtaaacatatgggggaaaatctgtccacagttatgccggagcagtgcccgagccctgaattcccctatcgtttcattgttgggaagggctagagccctgattcaatgtctgtgttgcaaaggccctggagctttttcacctttctatttttgccctgttagacaaggtcttccgtcttttcttccttgaaaaatctgcttatttcctcttccttcctgcgtccttccctcatttctttcctttcttccttcctcccacttccctccctccctctctctctcccttccttccttccttccttccttccttctttcctttatttctttcttccttcctctttttttcctaccttatctcgtttccagatatctgcctaatttctcctagttctggtgctacatcctcctctaacttagaatcacgcttaagtgctataggccaagtatgttgtgtgttagggaggaacagagtactttctatttgcatcaaaagggattttcatgtttaatggcaggaaggattttggtttgtgggtgaggagagggggtgctgagagggaagtctgtcttgattctaaaaacggagaatatttctaaagtaaaatatcccttctcatgtatgccagggtcctgggcaatgacagctccaaaatatcagccactttcccctttttgactggggcatgtcctgggacacttcagtgtgacctcacatttagacactcagtgtccaaaggagttaataaataaggctttgacattttctctaaatgtgattgtgcgtacatgcatactgttatagaggttaatgatgaatccaaagatgtctattttacaacttaaaacttgtgtccttttaactgaaccattcaatttccaataaaccatgaaataatactatttataaatacatgtactaatcttataaatatcacaattttctattgcattgtattattaaaagtgttagcaagtttaagataaatatttaaaacaattagtaattttttaaataaaatgataacctttatttttcaatattataggaacttaaaagaatgatgtattttaggcttttcttgacttctgggacaacgcaatcttgtctgtttcactcagggaagtattctttcggtattgtgatgataggattcctaatctgaaatctaaacaatttctcctagaaggtaatgaggttttacacaaaccttattaagtcagtcctttgctaattgaatgtttaaaatctggggcctactgggtataacatttattgagacaaagtaattaacattttctttcttgatgcatttctttcaatattatgcttaaaacctcaacacatagtagaatgcttagcatataataggagttcataatagctattaaaaacaaagtattaagtaagagaaatgtgttctagaactggcagtcttcttgaaccaagaaaggctcaagggaaacaaaaggaatctcaactatgtacctcagatttctgagtccagaagttcattttcagtggcagtacaaatgtgggacatttttggttaaaatacgtattttactgtataggtccactgtgattttaaatgcccttatgttgcttaacagacattacttatatctactttacaatgtgcactgggcttcacagcattaaaggtggaattgttttaaaaagtagccttttagtaagtcagatacattatcgatatgcttccaaatacttggtctaggaggaaaataaggggaaaacatagtgaggatatattgaaaaatattttttttctcagaagaaaggagatacagtttacataaatttgagaattcggcattgcttaattctccctaatgtctacgagaacttctgctttaaaaccagccccaagaacacattggtcagccagctcttgtgctgaatcccagaatattaagaaccaatttaaatgcttattaaaattattattcttgtcttacttttatatgtctatttttctctattcatagatagtcatctctatctcagttacctatctaaataaacatatacatgaaaccaagcataataatgccatacatagaaatctaaaacaaagagaaattttaaaacgattatttatatgagaaagagttcactcggatattgttgcattctttcgtggttgctaagtgcgtttattccagaagggtctcctatgcagcaggccctgaggtaggagtaataagaataataaatacagttgaggcagagatgtcggggtgatgctcagaggaagccgatgttgaaccaggtacattatagaaataaaatatctaaaaaggaggagagaaaaacatttttagtttcagcaaaattgatgtaattgtgaaagaacacattttccaagaacactgaggactgtgggtgacttgaatagaggatggttttaatggagaatgtgaaagaagatgctttcaaattaaattcacaccagattttgaaggacctgtgacctgtggtaaggaattttgtagtttaacttttattttttattttattttattttttgcttatttttgagatggagtctcccaggctggagtgcagtgatgtgatctcaactcacttccacctccacctccgaggtttaagcaattctcatgcctcagcctcctgagtagctgggattacagatgtgtgccactgcacccagctaattttttttttttctagttttagtagagatggggttctaccatgttggccaggctggtctcgaactcctggcctgaagtgatccgcctgcctcggcctcccaaagtgctaggattacagacatgagccactgtgcccagcctaaatttaacttttagactatttccatcataagcttcattagtggctaccttttcactgttgagtccacagtgattattccagggcattgcatgttatagatgcttaataaatggttgttgattgtattgacagataggtatttttagaaagaggagcaacaggatcatatctgtgtatttagttagtcaagaagagaaaaattcagacagcatatatgtaatgggaaggagcagtcctcaagcaataaaggtgggaggcgggagataaatacctcagcttccccacccttgtcagcaggagtgagccccagatgcccatggtggtaacatacagtagtccccttatccacagttttgctttctgtggtttcacttacccagtcaaccaagagctgaaagtaggtgagtacagtacaataaaattctttgagggattacagtctcatgacttttgtggtatattgttataattgttctattttattattggttattgttgttaatctcttactgtgcctaattcataaaccaaactttatcataggtataacgtgtatagaaggaaacggtgtatatagggttcagtaccatccacggtttcaggcgtccataggggagacttgaaatgtatccatcagggataaggaggaagtactgtatttaccaacatgtcctgtattggtttcctttcttttctgtttaatttccttacttccccaggaatgcttcctgggtttaccttacaaatagacttcccaaacttgcaatattatatctcaagttctgcttctgggagaaccccattcaagacagagtcacatggtccttataacggtctacacagagattattagggcctcatctaaaacagtgaccatgaaaaaagtggaaggcaaaattctaagatattgccccaaatccacatcccctgatgtccacacatcttctccaagctattcaatcaagcattaatctcagtgcttctgtgaagggatattgcagaaataattgaggtcacgaatcaattgactttaagcaagggaattatcacgaatgtgtctgaactaatcccatgaatcctcaaaagtgataggcatcttcctgatgagacagattcaaggcataagagggatttgatgggagggagattctccattgtagctttgaagatggaggtgccatgtggcatggatggtgggtctctaggagttcagtgtagcccacagctgattccagcaaggaaatgggatctcagttacacagcagcactggatccttcaatggcctgaaagagcacacaagcagaaactccttcagagccttcaatgagtatgactctgagcagaggactcagccaaaccatgcccaggcttcttaccaagggaaatggtgagctaacaaattatcttaagctgctatttttttttggttatttgctatgcaaccatggaaacttaatacccccaaaaatggtgttaggtttaggatagaggtagaagtcaagccttacaattgctagaatttggtggctgattgtgtcaaatgattgaaaagaaaagaggaataatcttaaggttctagtctgagttcataattatgccattaatgaaatagaaaatgtgtaaagagatttttttttcaggtaagaagtgttttgttgttgctgttttagtttgttacttttgagatgaagctgtctagtaagcaactaaaaatacaatccaaagctcaggaacaattctgggtctgaagaacaaacatttggaagtcattggcatatgtttaatgttgaaatcatggaggatcgccatacaatgtggcacatatacaccatggaatactatacagccataaaaaaggatgagttcatgtcttttgcagggacatggatgaagctggaaaccattattctcagcaaactaacacaagaacagaagccaaatatcgtgcgttctcactcataagtgggagttgaacaatgagaacacatggacacagggaggggaacatcacacactggggcctgttggggggtggggggctagaggaaggatagcattaggagaaataacgtagatgatgggttgatgggtgcagcaaaccaccatggcacgtgtatacctatgtaacaaacctccatattctgcacatgtaccccagaacttaaagtataataataataataataataataaaccatgggggagggtatctgagtattttgtgtagatgtgttcttcactgcttagtccttctaaattttggtaatagggctttcttgactgaggagaaatacagagtacttataaaaatgggaatttattagataatgtgttatcttaagattgtattccatctaatttacaataaagtaatttttaatgttctggcttgtgaagtagggtatggatagcaaatacatggcactaaagccaccattccccaattctgagcctatggcattactaatcaattcagtaattttcccttcagaaccagtattctttccaaccatgctctgggcagcaacgaattgattatagttcacactcatttgcaatcatgggttagtttcaaaaccatatccatttaataacagatacgttgagttgctacttgagggtggagggtgagaggaggatgaggatcaaaaatgattgcttattgtctgtgtaatggaataaactgtacaccaaacccctgcaacgtgcaatttacctatgtaacacacctgaaactaaaagttaaaaaaaatctaaaatacattttattttgatttttctttaaaaatgatgttttcttatcttttacatattgttgaatgatattagatagcctcctgaggaatttgttaagatggcaagaagtggttcctacaggtggtttggatatgaaacattgcaaagctaagttgaaatagcatgaaaaaagtataaataggaatttcctttgatccttctaataaggctgaatggtgttgtgtccacagttattaagttcaaatattataatttttgattcctatactggaagataggggcagttcttgcagttccaagaatgacgtttttataactcagctttatgctgagagccaacgtaatgcacagggattgatctctttccaaccaaaaatgggtaagatttgcacaaagtcatgcatatcaatcatccaattgttgtctcatcctgccatcatcttgagagacactgaaaactctagaaccactgcctgagacacaatttgtatgacccaacctaagaaaaaaaaagcttaggcagctccatttctggatcacagggtgttaacatattagtcaacccataaaagctcccactgatttatatggagttgtagcgttgcgtcacaggtggaggggcctaaattgtttttggagaaatatagggctctgtcttcaggatcatgacccgtgagtcacacccagggctcccaaagccgaggccagtggggacgtggaagaacttggcttagccacagggatgtgactcactaaaaaagatgaactggttttgaaaagtaacaagaaccaccttctattctctacatacctgctttcattccataacttaaaaaaaaaagcaaactaggagttttataagtttttatcagatatgtaaacatattattatttacttttagaatcttggtcaattttgctgttatagaagtggtggccatagctatcttttgaataacaggttgacaaaatgataattgcattacttgaagataatcacttgccaaatttatacaataagttgacaaagttgtgacaaattcataggatgcgatatccagattcaactttctagtcatttaagggactctaattagtaatttatgaaggctcattagcaggaagttcaaggtaattgttaacttactgctgtccatgcagtgacaggtgatctgaaagcggagtgacatgacaaatgtggacagtgtcacatcatatccttatgtggcagggaaagctttcatttcccgaataggtgaggcatatgtgttttgggctaaaactatgattccaggccaccagaattcttatttcatcattttcaaaaattaagttgggtcaggtgtgatggctcatgcctgtaatcccaacactttgtgaggccaagatgggaggatcacttaagactaggagtttgagaccagcctggacaacatagcaagacctcatctctactaaaaataaaaaatctgagctgggcatggtggtgtgcgcctgtagtcccagcagtttcagaggctgaggcaggagagtcacttgagtccaggagtttgactctgtggtgagctacagtcctgccactgctctccagcccaggcaacagagtgagacactatctcaaaaaaattaagttgaaaacaattttaacattttaatatgtgagcatccctttctatgactgctgaattttattctaagaatagataaaaagttaatttcaagtatcgaaaacttgccactttcttttttcatgtttggattacaggcctagaaacttcaaaatgtggaaaacataagaaaaaaaaaaaactagactactgggaaaatgagaatgaatggagatgtatctgacgttttgggagcaggctagattcagatcttctctccctgtagctaaattgggtgggcagctggcctcaagaacagtccacccacaacctccaactcctggcacgaacctgcttgagcttggaagacattgtcggccctagatcccaccctgactcctgcatgttctggacacctccatcaccactgagcagggaagcatgttcttcctttctcattcatttgcttccaaaagaggagctctgattttcttctctcttgcagtgctttttcctctatatagctcttaacctcctctcattctcttcattcccacctgaaaggtgctagttcatgtgtcaccaccatcttgcctgaatgcctgttccggtgatcttcttgcttctaccatttgccactataagtcgttctactcccagaagccagtagcatagtttcagaaggctaacataatagtgtcttttccttgtgggaaaccatcagtggtttttcactcccttaagcacagccaacaacgccttcaatgacctgctccttcagccacactggccttcagacatgtccccaaaagcactcagttagttctcaccctggggcctttgcacatgccactttctgtccaagcttgcagaccaatatatgctttggcaccagctctcacagagcctgcagcacttatggcaaggtgcatatgttgtttcctgtctgccttcccagttagacttgaggagtgctgtgaggatgggtatagaagaaacatctgttttcccagggcccagtccagagcccaccccatagtggatgctcaataagtacttgccaagtgcttcctagaaatatgttaactgtttctttctgattattagattttcttatttgatcttttctggcaaagtggttgcttctgtattttcttagaattccatttgtgtcataagtgatctcttccctacttcatagcctttatacgtgctggatctctcaggaccaacaatgctgtagctcttcaggctaagcagtgaagatgagtttcagggattgtgagtgttttcccagaccttctacagacatttgcatatgcataggcaagtgccttttgggccctcaataaatatttgttgagggaaggacaggtggattgataaatggatgggtggacggatgaatggttgggtggatgaatggttggatggatggatggatggatggatggatggatggatggaagacaaatatactgatggatggtgtgctgaagatgttgacaacttctttagtctgtttatctctaaactcctttcccctctgtgaataacttgtcagatcccttttttgctagagacactgtcaaggaaagcatttcctaatgcttgtaacactgctaaagcaagaagaatattggcagaaacttctattttcaatgcagtttttaggaaggttaattactttgtgtttctgaagatgtaaatgttcctcaaggaagaaatctctgaataaaactcaatgacaagatctttataatggacttctggttattgctatgtgcaatgccctacctataactcgcattttaattgatgtatcctgagcaagatttgaaacagatctctttccctctcttctaattttaatgagtcttctctagcaagcacctatatcaccagagagatgcagagaacctcagcatactctggatgggcctccctctgcaatttatgatgaagtctgacttcagagtgagttcgcagcctccttcctgcctctcctctggtttccagggtagcagactcttgtctcccttcagacctgggctctcccagctcagtcccacttggcatttctaactgaggttatggatacacattgagcccagaactcattgcttttttggaaaaggcaaaataagagaggggattttccatattcacatttttccacagaaatgtattcataagctttaaacttgcccaagctctgttaatgtatgtggttggctcctgtgccaattttcattgtgaataagatgctaaataaaagggttcttgtctttcccctttctcctcccctcccataatttcaacttcataaacctattttgtaagtgaattaggtcttaggagagaatcagaaacgatgttgttcttttagccgcttacagtgtttgctttaaacccttgataggaacgtgggcttgtgacagcagcggcagaggtaaacagatgactttatatataatgctttttacaaggtggttcagttcgtttctaaccttggtctcggcgtcatggaatgagccagggaaattcctccccttaaccctaccctgcacgtcctcccttcaagggcaagaaaatgtccattttgcctttggtttcacagctctttctccacagtagagcttgcataatgctataccccccaatcccagggaaccccggtagtgtcaccaggtatttttattattatcattattattttcatcaggtgactgtgaatgttcacaataaaagttgcaatttttatgagccatgagctggcgtgtcctggcatgtcctggttgtcaagtttctgtgcattttggttcaaatgttccctgcctgtgtttattcctggtcagaccacacctcctgggactgtctttgtggcttttgctcagctgctgactcaagttgcagaagacatggggaatagtagagcaaggtctgcaagattctggcctgaaggaaaaggctccatagctctgcttttgagccatggaagctgcctgcccctcccttttcctggaaggtcccatgactagtttcctaataccaactagtcaagaatatgtagggctaaagggacattaatattaacataagtgatacagtgaggaccagaagccttggatgtaagggagaacacgtgagctttccgtcagagaagactaggttcaaataccagtcctccaaggaaagccagctccttgctggggaccttgggctagtgcttagtatctgatttcttcatctggaaaatagctataataatggaacccatcttagagggttggttaacattatatgaaaaaatgaaagttcaatgcacagtctgtgatctgatataggtcaggatgcaatattgttaatactattagctactataaatattattggtaagtaataatttcctataattaatataataaacaatattgtatcaaaattatctaaatcattaatactgataagcaataattatttactggtaattatagatattaatattacacattgattgatcttgcagaacctctttttcttcatctagaaagcagagattaacatggacattgaaaaaaacctctgactctctagggattttgtgaagatgaataaatgactttgaacagtgcctggccctttgcacagtgcctagcccttcagcctgtaacaagtgttgctgtttttaacgagaggttagttgtccttctcaggccctctgtaaaagaatgtattactttgcttttcagccagtgtgactgtctcattccagcacttctattgctgtctataaaagatgactgtggccaggcacggtggctcatgcctgtaatcccagcactttgggagtccaaggcaggaggatcactgaggtcagaagttcaaaaccagactggccaacatggtgaaaccccatctgtactaaaaatacagaaaaattagccaggtgtggtggtaggcaccagtaatcccagctactggggaggctgagacaggagaatcactgaaaccccagaggcggaggttgcagcgaactgagattttgccactgtactccagcctgggtggcattgtgagactccatctcaaaagaaagaaagaaagaaagagagagagagggagggagggagggagggagggagggaggaaggaaggaaggaaggaaggaaggaaggaaggaaggaagtaaagaaaaaaagatgactgcaaagtgactttagaggcaggtcatgggcctggtgacacccagccatgaggctggatggggggcccagtctcctggagaagatgatccctcggccttgtatatctcaatccaggcccaaggtcatggattcttcctggcaggctaggctgatggacttggtttatgagctgcagtctgtgcctaaagacacctaggaggaagagcttagctgctgaatgtacctgggggaccttccccacctatgttgtctgcctcagttgcctcttccttgggaagaggtgcagacagaaggtggcagactctgggatagatccagtagagctgtaaaaaacaggctggcttgtgtcacagcttgcctgtccctttaagccagggcttctggcagacggacctttgacagtctggtgaagcctatggattccttcctgaggatagttttaaatccataagataaaatatgtggggtttcaagggaaaccaactacataccaatttttttttttttttggaattatactacagtaatggatgtatttctctaatagtcaattagaatgatatgaggtaggtgctaaaaatataataattttgaagtagtaatgagtgaaaatggtaccatagggcatccctaggatatacaaatatttgatttcttttaggggcaaagtcatgcagcctgctaatgcttctgtgatttgtggtctgtgtacatattgaaaagaagtgaaacatttcagttgaaggttagaacaaataaggtggaattttctctcctgtccaggttcacagaccacataataaggagtccccactttgctcagctggtctcctaagtctctgtgccatgagaggtcgtggccccaacttctctttgtcttgtcatctcatttgcgtcacagcctcttgcgtgctctttgacctttatgcagtacccctgcacccatgatccaggtcgcatcaggcctgtttgtgcactctcagagtttaacggaagaacccatctttcatacttcattatttaaagaaggctagactgattttaaaagcacaatgtacatgaaaatcacctgaagtatttgataaaatccatatttctataccaacaccctcaatttgagttgatgggtctgaggagaggccctggtttctatattttaaagaactccctaaatgcttctgaggaaggtgctgcttgaacaagaaggtgcccttctgctaagagacaagccttttccagcttgaaaactattattttaccattctatattctgagcaggaaatgaatggacagactgtatgtagcgatgtgatatacaaacagggatggcagctacaagaatgtggaagtgtggaaggaagaaagaaaggaaaaaaggaaggagggggagagaagcagaaaggaagagaaaaataagggaggaagaaagaaaaggaaggaaagaaaggaagaaaaaagaagggaggaaggaagaagaagagaagcatggagatagggaagaaagaaggaagaaaggcaaaaagaaagggaaaagatgttctaagggctattaaacctatgggaaaggaaatttttatcagcagaatccagagataatataaatcagcaagaagaaggatagattgattttgaaattcaacaaatatttatcatgtgcttgctacattctagggcaggggttgaaatctcaaacacacagaggagccaggcaagatggtgctgatataaaagattcagggttctctcggtcctctatttttgcaatttgaggtaaacagtttggctgcataagaaaaacaacaggctgaatgtaagagttcatgctgtcaaactttggttcacagcatccggcatggctacctagggccttgctttgtgtacacatgaaatctatcttccatattctccaatttttcaagacaatttgacattttatagaaatctctttatgaatagatattggaagctattttagtactatttctgcaaaacaaatttacttaaaatgtatccactttaaaacaatcattttatttttcccatggattatgttggttggaattcaggcaaagtggagctgtttttttttttttttttttttttttacttcaccacgtctgaagcctcagatggtcagactcaaaggctgggggaagtgagggtagcaactaaacatctaagggctaggatcacctagaggctcacttacatgtctagtgcttaggctgggaagactcaatgatcaggactattaactggagcaacttaatgtggctttcccatgtggcttgacatcatggcgggctcaaggtagtgggactcattccactgtggctcagagcatcaagcacaagtgttcctgcaaagaaggagggagctgcatggccttttatgatccagtcttagaagtcatacaacatcacttcagtcatactatattggtcaaaaccgttccaagcccaaccagattcaaagacaggaaagatagtctctacttcttgatggggaagtgacaagtttacattctagaagagcgtgagagcgagagatattattgcaggcatctttgaaaaatagaatttgctgtcataactaattcaaaactttgttttatcctgtaatcccagaacttcaggaggctgaggcgggtgtatcacttgatgtcaggagttcatgacaagcctggccaacatgatgaaaccctgtctgtactaaaaatacaaaggttagccaggcgtgatggtgcgcgcctgtaatcccagctactaggaaggctgaggcaggagaatcgcttgaacccaggaggtggaggttgcagtgagcccagattgtgccactgcactccagcctgggcgacagagcagcaagacttcatctcaaaaaacaagcaaacagcaacaaaaaaaacccttattttaaaaataagttaaacacagtgtgtacagcataatgcatgtttgtaggctagcataacagagggttgcactagttttttacctctgttacagggtataaaaattcggagatgattaagatttggctcctcttcagagaacgcagtcttatattttggaattttggaatctctatgaattacatatttatactttttgtacccttgctggagttgaggagagttggatgaaagtagggagggtactgagactaggaggcagctatttattagaataacctggaaaatggaccaatcccccccattcccagccccaagaagtttacctctatccagaagaggagcatttgcatttttaatattttgagaaggttcagaaacccgagcttcctactgcttcctattgagaagcactgttctaaacagacttctacattgcaattggtactcacatatttagacatcagtcttaccgcttaaattcttcatttgcttgtaaaagccatgtagctctaaactcagaataatccattgtctactgcccttcatccctcatgatcaagtttttctaaatatgtttggaaattgacatgtgatttaaaaataacttaaagtatgtctgatagcccagataaggacatgtactttgtagtgccattcatggaaatagtgaccttgaaaaaaaattctggagggccttcctctcatcttcctttctccagttcctatggatatggaaggatagggctaagaattgctgtctgccttctgacttaataaggagacttttgctcaaataaacactgagttcttttttttttttttttccaagccattcaccaactcatataatgtatctttgtgaggtctgttccttccataggataattcagaaagttatacctaggctgggcacagaggctcacactgatgatcccagcaccttcagtggctgaggtggttaggattgcttgaggccaggagttcaagaccagcgtgggctacacaacgagcctccatctctatgaaaaaatttgaaaacataattttttaaaaggaaagttatacctgggccagggattctgtaccgttcatgatcttgtattccagggtgtgtaatattaggaaggtttaggtttattgtctaaatgttaattgtgtaaataaggtggtaaccatggcaacccaatcccacccccctcagcattggcaggtggccagggaggtgtgatcacaacttctatctgagctcacctttgcaggtaatggggcaggtatgtggcattaaagagcaggaaggccagcaagggttggtaattgtttaactcttccagtggcactcctctgagtacatggaccacacctgcaaacctggcaggacgtgccgtgcatgactggacggaggcactgatacactcggagccaaggaatgggtttaggcaggagctcagggctgaaatagggagcccagcctgccgggctgcttgaaatctcaggactcataatgcttgtgctttagggagacaactgctcattagctggatgaaattaaccagtcatgtcaccttttgacacctcaatttcctcattactgaatagtgagggatttgaacatattatccctaagctaccttttagctctaacatagactgagtatagtctatgtcaagactctgactagagtgtaggtgttttcagattggaagaattatcagaatcacttggagaactcaacaaaacacaaaccactgagctccacccccacccagattactgattctaaagatctgaggtggggcctgagaatctgcatttctaacaagtacccaaatgttgctaagctgctgatttggggcccatagtttgagaaccactgttctggtctgttattgcttggttatgttctggggattttcctgggccacctcatgtagctgcaacattctataaagagggctcctttgctcaaggagtgaggttttatttcctgaattttcccagccctttgttgttaatttttccaccagactgggcatctttggaacatcagagtttgaaaagagaaaacaaaatgaggcatagctcattcgattaggccaaggggccatatttttaccagctttatgtcttatgacttgcctagtactgtttcttaggaggaggagggagagtaattaaacattttctggacttaatattcaacttgcattgccttagttaatactatttataatctgatttgaaatatattcagcacagacagtgtgatatatacttgggattcatttttatctatactctaggagctcattgtatgctgcttctaaaatagctcttaatgatttccacctcctagtattcacacccttgtgtaatccactccctctccatgtgggttaaccctggtgacttgtttccaaactaatagaatgtgacaaaggtgatgggatgtcacttttgagattagaatataaaacactgtgacttccatctttcactctttctgctgctggccatttcctctctggcttttcctgaatgcttgctgtgatgatgaattcagagaggcctgcatggcaaggaagggtgagtgacttcctgctaacttccaacaggaactgcagtccacacccttaagactgggcttggaagtcgatccctccccagtcaagctttccaatgagaccacagaaaagaccaaccccttgatcacagtcttcaaggagaccctgaggcagaggacctagttaagtcctgtcaagatttctgaagcacaaacactgagtcaatgaatgtgtgttgttacaagctgccaggttaaagataatttttaatgcaacgtgagataattaacacaaatctattgacaaaggatgtttcttagggactaggtagtcaacatttggaaaactcaaatcataagaccacacttaatggtaatgcagagccagattgaactggtttgtgaggggtgcttgtacacaactctttctaactccgtatacagagatggcatgttaatatagtagcttgaagtaagcatgatgggaatacttatgcaatgaaaaccagcaagcaatacaattttgagatgccttttactagcatagcactgtactttaaaaaccctactctaagccctagctctcactgtatctttggtgaataacagaatcctggtatatttgcataatggtgtgcagagagtggtgttgcattcatgaagccagggttgttaaaatcatgtggattgtgggataatattacacagggctgctcccttgtgtgaacagggtgggtgaccccaagagtctgcaaacttctgaatagcatctttagcctaggaatatgaaataatcccaactctgtttatagcaggtcatcaatacctgaattgggtgaaattttggcatggaaatatatatatttttaatctgtctcaagtgtaccttctgggaaaggctctgtggaagcatctagctagacagagaattaagtaaggaattcctggcacttggtacctccttgcaaataaatatttgtatttggggaaatttatctctgacaattacttttattgctacatattacctgatgggaaggttggggagaagagacttagcttacctctatttgttgagagctaccaatatcaatagaaaaggaactagtaattgcaaatgatcaaatccactgaggtcagtttgtgggataaatcattacagtaaccataaaatacagatatgctacaagtcttcattttacacttgaagaatttggagtacaggcatggtggtcatctaactgagtttaagaagcttgtacatgacaaacaaagttaaagggctccaaatcagctctgaccccaaaatcatgtttctaatctctctgctagaggtcactcctcccccttttcactgttatagcctgaaaaccttagaggggaaattccagggaaggaaacttcacaggctcaagtttcacagtcttccctgacaggaaatcctagctaaccttgaacttcagggtcatctgttgtggtttaacaccattttttcatttctagttaaaagggcagctctgctcactgtcccttgcatgtcatgccctgaaaacatctcaactccctcttgttactgcctgaaaaatggattccccgaaataataagtcctccaaattcagacatcagctttcctcagttaatttctgcatcatcatttataatattggaaggttcttacttttaagaaaatttggaccaatgccccaaatggtcttcccatctcagagcaaccaaaaaatgtgactgtggctgctgccaggacccctacatgcaaatgaccagactgtagagagttaagtcttgggacccacacatttctcccaggggaagtcattatttcagggcttttcactgtgttcatgaatttcttctgtgatctaggccttggggagaaagaacattcacctaatttcctataaaaggcactgtagcatagaagtaaagacaatcagtgttcacatcatagttttgtcttttatggcccgtataatcttgggaaaattacttaacgtctccgtgctaatgttttcttatctgtgaaatggaggtgtgagtactgcccatctcatgagtcatgaaaaggattaaatacattaagctctatgaagcgcctggagcagtgcccagcatgccaaaatactcagttaatgttacttcttacacatggtgggcctgtttatcactgctacttcctggaagtccccgtgcgtaatggaaaggatagctttgtgctgtcctgcttgtagccaaccagtttcttagttcattcagcttgctttttgtactccaggagtgtatcagttagctcttgctatgtaacaaatttctccaaatttagcagcttacaacaacaaacatttattatctccagtttttgcaggtcagaaatttctgagtagcttagctgggaggttctggctatgggtctttcatgaggttgcagtcaagtggttggcttggttcagtcaatttcaggctcaactggaggatgatccatttccaagctcacccacaaggatgctgtcaggcctcagttcctcaccatgtgggcctctacacagactgtctaaatgtcctcatgacataacagatggcttgctccagggactagagagaaagagagagatagagagagaaaaaaaatgtaagcaaaagacaaaatcttttatactctaatctataacttatgccatattctatttgttagaagcatgtcactaagtccaacccatactgaaggggtagggaattaggctccacctcttgtgggaacaaatatcaaaaacaaatgtgacatatttttaaaaccacaagtgtcttttacaacccatatatcttagaaattttaaagtttaagtgcactttggagatcaactagcacagctgcctcagttaagagatgagaagaataactcaagagacttgcacaaggtcacacaactaactggccccagggactggattcagctctcttactgttgttatgtgcagctgtacctcattttcaagtcatgtcgatggagtcacttcactgatatgctgtggcacatcctgaagccctaggctactgagagattgaaacttgtatatgatatctttagacttgcactgtctagtatggtagtcaatagctacatgtgttgtgagttacatgtggtgtcaaatatacatcagatttccaagagttagtattgaaaatgtaaattatcttattatttcatattgattacatgttgaagtagtattattttggatatattgagttaaataaaatatattgttaaaattcattttctctattttttttttttttttgcttatttgtatttctgctgttgctctagattaaccaaactgatctccacattctccatgtctttggtctatcagagtcttgcttttacttccatttctgtttccagccacggtgactgagtcacagcaacacaggctgctccaaggcctctgttctctgctgactctgcagagtgggtgcctgtgattttacaggtctgctccttcagacctttctgaacaacactaataactaagggtgtcctgtacaactgcaacaatggtttccaatggtgtgtgctctggtgagctcaaaacattccctgaggactgaacttccactcaaaagctgggtcccaacactctacttcctctttttaaagaccctaccagactaagtaaccctaactagatccattacatactgtttatttccttccttccttccttccttccttccttccttccttccttccttccttctttcctcctccctccctccgtccctccatctcttcttcccttcctgcctctcttcctcccttcctcccttcattttttcctctctctctctctctgtctgtctctctttctttctaaattctgagtcaacacagaaaaattcaagcccagatttggtcttgaagactattgtaaataaagtgatcaattgaatctccctggactgaacatttggactgaacatttggaagagtgattagtgagaggagttaaaagacaatcaattcagggtcttgccatttattgaacagattttcagccccttcactgtagggtattgttttcagaagatctgcctgcccgggattcttggttataattcctctcatgactggggaagataaatatctttcacagtaatttaaagtggttagtctgcactctctctaaacagcttccttccattgatcaacgggtgggccatgaagcctcttgcaggcctctgcccctaatcacccttcttgttgacattccaaactgctaagctcacaaatgtactgggaggacagtagctagaggacacttattccctaagagagaatccttgactttcacggtatgtgactttgttattttcccatccttgtaagggcttgacattgtttcagaaaatagtgttgaattggggaatgtcgttttcagtttctttctcactgacccatgccattcaatgtcttcatcctcctcaaaaccttttttggaataaggcaggaaataaataaataaataaatgaaactgtctctaatgtaaaatgagttgggtagtttgaagatgtttcctctgaaacacttgaaggaagataaagactgaaaagagagaaactgctatattttagatgtaaacaagaacaagggccattggataaatatggtaaattatacagggctagcattttgataacttgtgatctggagaaagtataagttggcacttccactttttttttttttttggttttgtttttgataattgtatgcagcatagaaatcccatagctcccaaatcttctactccaactgccatttgaaattctaccacagtcctatgtatcatcaatgacctccccaatttggccacaaaggatactgagattctaagtagagctagaatcaaacaggaaaccatgtgagtatgagcaaaagggtaagagaagtaagaaagctggtttagatcagaaaagacatctcctccccccagaattttctggaagatgacattttgtaacaataagtttatatccagtttgtaaatcttttggttacataaaacaggaccatgtctatgtcaagtaatggaggttactgttgagttactatgacgatggcacaggcagaagctagtgcctcccttagactagggcagtagttctcaacagtgggtgggagcaggtagagattttgcctctggaggacatttgacaatgtctggggacatttttgattgtcatagttacagaggagaatgctggcatctaatgggtagagcccagggacactactaaacatcctccaaatgcacaggacagctcttgacaacaaagaattatccagctcaaaatgtcgatagtgctgaggatgaaaaaccctgaacaaggacaagaggtgaccccctactccctgtgtggccctgtgacctggaggactttgtaaactaaacatcaaaaaacaaggacaataaatattgtttttggttttcacattcataataaaattctttacttgattgagtataaagttttaagacaagagaagctgacaagcaatagacaaccacgttgcccatcataaaacctttatttatattcagagaacagacattgagtttcagttaagtttcccttggaaataatcatgcaaaggctgtatcattaagcattgtaacaggtagatgaggataagtcttcctcatccctaaaattcttctgaagtagaatagacacccacctgcctggagtggttaaggtaagaaggaaggacaggtaatcctggagagaggtactgcccctccacttcgctagtatttgcaggtctagattctatctttctaaatattacagaatgactcaatagcacattctactaaaaaatggtaatgtatcatttaaaaactcttcaaaaaatggttatgaaactgcacttactgttgcttattatactatcttgatcataattttgtaatgtttgagagaggtactctctcctcacctccccctcacctctcagatccatcagccatccttctctgccttgttctgtgtccctggggatggacccttactgattacagcatgtgaattctcttgttctttagcttctacctggctgagctaatgcgaggtgctggcaggggaacagagagaaagagtagaaaggactcagaatacttattctcctgcccttacccagccttggcacctcttgcctggtagtggctaccggtgtccatgattacagcttctgcttggtggaaacttctttgcggttccagttttttctggctctgtcaaccctatttttatttttttgtctttcaggtcaattggaaaaggcctctagctgttgctggactcagagttcctcaacatcttttatcagttccattaaaactatggggagggataacattaggagaaatacctaatgtaggtgactggttgatgggtgcagcaaaccaccagggcacgtgtatatcttgtcacaaaactgcacgttctgcacacataacccagaagttaaggtttaataaataaaatacaataaataaaaaaactatcaatatctcataaagcaacaggaaccctcattcattgctggtggagatgcaaaatggtacagccactttggaagtcagtgtggcaatttcttacaaagctaaacttcattttactatacaatctagcaattgtgctccttggtattaactcaaatgagataaaatcttatatctgcacaaaaactccacccagatatttatagcagctttattcataattaccccaaactggaagcaaccaagatgtccttcagtagatgaatggataaacaagctgtggtcattcaacaatgggatattagtcagagataaaaataaatgagctgtcaagccatgagaagacatggaaggaccttaaatgcatagtgataagtgaaagaagccagtccagaaaggctgaatactctatgattccaactatatgacatagttgaaaggcaaaactacagagacaggaaaaagatgagtggttgccagagatgtgaggagagaggaaaggcagaataggtggagcacagaagaaccttatagagcagtaaactattctgtatgatactgcaatggtggatacaaggcactctgcatccttccaaacccatagaatgtacaacacaaaggctgaaccctaatggaaaccctggacattcattaataataatgtattgatactagttcatcaatcgtaagaaaggtaccacaccaaagcaagatattaataataggggcaactgtgaaaggcatgggaggcatatgggaactctatactttcagcttaacatctctatagacctagaactactttaaaaatgaagttcattaattaaatatatcagtgaaccatgtatatatatgaggaaaagtcctaccctcttctctctgcatagcctcattattatttatcttcttttattatttatcttcttcttctattatttatcttctctttccagggaaattctatttcctgcccagggcctgactattatatgttgtatcaaaaagacattgtgaaaataaagaaaaccgcaaaaatgaaaatattatcaaaacctttttattcatgaaatgcatgttagacaccaaaatattggtggcttttcatatcaccaatgctaaaaaattaattaaggggtatatatcttttttattccttggcattacctaagatttagagaataaagaatgtccaaacaccctggttttcctggggcaatcctgatttagggctgttttcctgaatgcagtcgttaacggaaccccgttttcctctcaaacttgtcctagtttggataataagttatattattattgtgcctctaatactttctttgcaaaaggagttacaaagcaccatgggcagagtctagtcatactcaccccagcttgtctgtttgggcactgtctggaacagatagactaggctgggaacgaaggtgtgtctgccaggaccaaacgttccaaaaacaaattttttatcagatgaaactataacctagatcttataatgattaaatgcaatttctgtagtgaaaatcaccttaagtagtataaggatttgctgaagatgaacatcaggccccatgagttcctcaacagctcgaaccatggagagttcgtgcaggcagggtcatttgtctaccacctacactgtggatcaggtacagagtacagagggcttgctctatacatatatagctactaaccagctccagaagccaatattttacctaccaggaccaggaccttgaggtttccctttattattatccattcattcaataaatacccattcaattcaggcaccgcattgaaaatacagtggtgcataacacaagtaaaaaatatccattctagtgggaagaggcaaccaataagcaagtaatcaagtcagtgaaacaattcatataatggtgaatactaggaagggtatagatgcaaaatcattgcacaggagagagggagggcttctttctagagatgatagttgaactaattctgaagaggaaagggagccagccaagggaaatcttggatgttcatcccacagtccctctggaattaatgaaactaatgaataaactgtgtgccaagaagaaatattataaatgttaagtggtttttcttgataagcaaaaagaaaactagtattctaggtattacatgtgggcactgtaaattttaaaaagaattgttctcttgttagcagtcatttgttattgattggtaattgccatcatcaaaatgccaaatcatgttgacccatctcttctgcttcaagactttcccagcctgttccagttactatggctgcataacaaattacccagaaccttagtggcttaaaacaatgacaacacttgttttgtttatgattttataattgggaagactccatggaaatggcttatctatgttccactcagcattaactagcaaagtgcagcgagggggtccttgaaccatctaaagtcttcctcattacctgtctggcagttggtactagccattagcagatcccagctaatgcttttggccagaaaattacacgtaacctttccaggtggcctgggcttcctcacaacatggaggctgtgagcatcctgacagagagagcaagggccaactgagtgctgtgttgcttcctatgacctagcttcagaaaacacgtaacattacttcagtgatagtcaattagtcacagtggcaaaaaaggctgtccagattccaggaagggaacatagatccatctctcattgcaggtcacagtggaagaagaacatgtgggatggcatctattggtgcagccatctttgaaacacatagtgttccatgaagctcaatcctttgagtttcttgtaagacacttctatttttccagtccatatgcctaaaagaacacataaggcaactgcaaagataggagaagtgaaataaactgagtgggaaactcaaaaatcctcatgggcaagcagacagacaaggaaagcctagagactcactcattattcatctctgtcctgtgtatttatgataggtatcaagcttgaacgagtcattaaaaatatgtttagaaaactttggtttgaacaaagtaaaatgtttttctatatttcttatcttcttagaaaatttagtaactatgtgtatgtcctccaagagggacacatagtatgaaatttatctccatcttctttgacgtggaatcctttttgcatacaatcgtgaaatagctcacgggaccacttaggaaattctattaagccaatttgttctaagaggggttataatagacccacagagtgggatgtttcatgggttttgtgaggggatggaaaaattctcttccagcttgaagctgtgaaaggaatgcaatgtctgcttttcaactctggttagcagaatgttgtgccctatggtacctgaatgaaatagctaacctgagtgtgctcaaggaatatgttgtttctggtatgccagaattcaaaaccagagcccattagcatgagtacttcaaggactgccgctgatgtaacctttcaggggaaaggctggtccatctacaaatgactcaagatgtgatgaacagtaggaagccaagccagtgagtaagggacaacatatgctgctgatggagctcaacttcaccctgcctcattggaccaagttcattacctgagagtgatgaaatgaggcgaaagagaatgtacaacacgaagactgcagaaacttacaaaaggagtgtaggctagaaatctagaccagcctcaagatgccaagattccacttagagaaaagggaaatacatctgtggaaattaatgagaaacacagatattccatgggagttcagaacctggaaattagtgaggccaagaaaaagagggatatgacagagggcaaatttcataggagtttgcaacatgatatttgggtggaaaggagcttggtttgcttttagcagcaggaggaaaatctccatttcacatttaacaacaaaaaagggaacctggtgaggactaatttggaataccatcttcgaatttggtgccttgttacagtaggggagtagttgacctggccaaaattccaagagccagttgaatgctgttgggtttgagtacactgattaaataagtcaaatcctcttggccttctgagcatcttaactcccagcaataaccttagaaaacattcaggaagactatgaaagtcctggaaaattccaagggaagtatttctacctaaaagtatatgaagattgaaacagccaaggaaggaaggagattattgctgttggagagcgtggaatttcaaccagagtccagagaagacactccatcctcaagatgcattaaattttatacgaggtcttttgtggactgttcggacacatcctgcctctgggcacttcagattagcttcggtactagagtgtttgatgatttttcaaaaaccatgaatcctctctgacactggcaaagaagcttggaaaagatgagataacatacgttatttactagctcaatgattgctaagtggtatttttcttcttttgattagattaaaaaatgtatttaaagaatgaaatgtattaaacagaagctatttacacttaggcaaaagtcctgtttcagagttgggcaagtgttcgctgcaatcaggatcataaccacacctgtacgatttctagcattcattagaagacctacccagacactgaaataataagattgtcaacttttgccctctctgggatcagtgccaaatgactgattttcaatgtcctggctccatgttgctctcattgtgatctctcttctgattctttacttcttacttgcttgttattttcctccttatcattctctgcccccaacttccttcttcttctgtctggacttctgtcttagttataagaaataccatagataggggcttgcgaacaacagaaacatatttctcagagttctggagctggaagtctgagatcacagtgcttatgtggtcaggttctggtgagggacctctttcaagttgaagactgtcttctctttttatcctcacatggtagaaagggagcaagggatctctttggggtctcttttataaagacactaatcccattcatgagggctctatctttatgacttaatgtcctctgaaaggcctcacctcccaataccatcatattgagttaggatttcaacatatgaatttggagggcacatgtacattccatctattgcagcttgtcactccccttctctcttcactcccttcttccactgtggactccatcctgctttttattcacttcttttgcctctggttataaagacatccccttttctcatacccttagttaaaaaccaccctatatttgtaaaaaatttcttcttcagaggaactttctaggaattgtcttcccattctcaaaagatcttgtgtgcaagaagaaattaccttctgagtacaggtaccatctccatgaatttttgatgttcagctcaaatttggaaggaaaaattgatatctattaatttatctaaaaaatgactggttgtaaggtaggtgctaggaaagaatataaagatttgcctccttttcttgaagacgtgccaactggcagacttcctaaaacccaagtgagaaaatgatgacaggccttctggacaggatttgaagtaagcctcatagcatagagagaatttggatgtccagagttagaaggagacaataatgtggtattgtggacaaaggatgcattatcataagggacctgtttagagattattgggcaggaaggaaaggagtgatgaatggtgttggaaagggtggcaaggccagtggtagagggcttttaagtgtagcaggagatacctagaaatacaaagaaatgacaacacacgctttggaattacatggaactgagtttgaatccaggcttctccacacactcacactgcttggctcacctggttgagcctccgtttctgatctttaaaataatattaataccactcacatttcagtgttgtaaaagcaaatatttccaaattgtaaacattaagttcgatggtgaatgaaaaaattctttgcatggtgtttggtttttggtaaaagctctaacacatgatggctattatcaatattattattaggctgaaagccagtacgtttgttactggaaaagaaggggggacttttaaattgtcattagtctaaagatttttttctggaaagaaatgaagtgaaacctgtgtacttaaatataaatgtaaataaataaatatatatatatatatatgataaactgcattgttggtatcaattctctacccctttctgtatccatgtttttcaccatgcaaagtgtcttcctattgtggggtgtaagtgattctacacccttgagctctgacactgccatgggattggtagcagttatgatgtaagcagggccttgaaaagtgctttcaggataggatctgtttgctctttcccctctgccactttcatgaggaaaaacatgcccaggacagcacacaggtcacaggaggaggaaaaaaagtcacctggagcagtgacctctgtaacctagtggaggtcagaactgctcagccaggtgccatcaagatcagcagactctctgtcagcctgtagacgtgttttaatccatgaattccagtgtgatttgctatgtagaattattgtgaccatagatagttgatacaatatatatgtatgtgtgtacatatatagtatatatatatatatatatatgtttatgtgtatataggaaagcctgaaaaactttaattataatatttcatttccttctataagtaattgctacatgatattatgaatatttttaaaaatccaaaaatatattttcccaagataataacctctatgtgtacagaatccaacctgacagctaaacattcatacctcaatgatctttgaagaggtatttattttccttagaaagctgggatgacttgcacagtcttctacttggtctaggtcattgtgttgtattcagtgaatataatggtatggatcaatgtgtgcaataccaaattatcgttgcaacacattttctgttgtgaatctttagtttctttctaaattccagtagaacagaactacctgaattcttttcaatgagacatcatcttgattgccatttatagaagaaaccctaggtatccaaccgttactgcaaatgtgtctccatagtcagcaaaatagttgccaaatttttctcatcagaattcactcaaaggtgcttaaatattggcagtgtcccatcagcaaatggtgcaggtagtagtaaggaaaaggaaaaatatggagaacagtttaaagcatcagaaagcagagtgtgtaagagagcagacaaagtgttttgttaatctctgggcagttttgtgggaaagcaagggggacactggatgaagctttataaacacgcagccattaaatgagtccggatgtgcaaagagcttagaattgtgcctggcataaaataactgctcaaaagatgttgaaacattttgtttcaagcctttggaagaaaacaaaacaaaaataaattccccttaaagtttacctttgaaaataagtcaagaattttcttcttgtatttggacatttgaaataaacaattattatattcatatgcttttaagcacaagaaacattgttgataaaacacaattgtacgtcagcatcttttagtcaagtgactcatagatacatgagaagaacacacaacaatattcttattattttctttctctgtttaacatttttttttttttaatggagtctcactctgttgccaggctggagtgcagtggagaaatcttggctcactgcagcctccgcttcctgggttcaagcgattctcgtgcctcagcctcccaagtagatgggattacaggcgcccgccaccacacccagctaatttttgtatttttagtagagccggggtttcaccatgttggccaggatggtctggatttcctgacctcgtgatccgcctgcctcggcctccctctgtttagcagtttttgacaattactatttgtggatactctgccaaggccatgaacactagaaagctgttccctgatttcatagagcactggctggttgaagcaatgtgatgcaggtacataaagagtgctaacaaaaacaggcaagaatgccataagggagaaaaaaataacagtacaattcattctaaaggaagagaaattgtaagaaattggaggggtgttttaagtcatgcttctcatatatgattaaaaactgatgtcagaggcatggagaaaatacaatcaggttgagaattagtaacttcctttctaattaagaatgtagtagattgaagaagcattgttctcagccctctctacagggactctatgttttacttaagtaattgatctgaggtagctcagaggcaccttggattttgtgaagattacattcagcttttgccacttggacacccaggactatatttgtggccaaatttagccaccgtttcgatcctattttattttctgttctctctctcatagtatatctgtaaattaccttaagtccttttgtaagatatagaacgaataagtaagtaatgaagactgtaagaaagtcattcatcgtccccacctctcaattttgtcaattataaaatgaaagactaggattaagttaaactgagtttatttttttctagctctaatattttatgattacatgaatgaatgcaggattgttcataaatgaagaatagcttaatttagccaatacttagaagtagtagacatgaagactttctctgtaagaatataaataacttgacttaaaaccattggttgaagtcaatataccagagtttcaattgtaaacgcctcctctcatttattcccttctaagagtggtttgagcatataaatgcataaataaataaatggctttgtgtgtccaaaatctactggcacacatcaggtcctatgagacatcacattatcaatgatacatttcaattgcttttaaaaaataaccagcaacttttcaggttttagagatcatatcaaacatatattcttagaggaaaaaaaaaaacatgtattcaatccttaactaaaaataaacaatgaaatctctaaaggatattccagtcttatatcatcagctatcaatacctgttaaccaacaggggaagcttcaaaaaatgaagcatttggtttttcttggtggtggattcttttggaagatgaaaactatggaggggagaaactttacctaatgctttaataacagtaagagtagatattgttatgtagtactgggaactgcagagctggtaagtttctgagctcttctcataacaaccttattatagattatgtatgaatcacatttttgttctttataattcaattttgattatatttagtttgatgatctagtatctctgaatatgagacaaaaataaaaaagaatattggagtaaaaatgcaaacttgctaaaaaatagagagatataaattaaaatattagaagtcacagaagaaaacagaagtcttgcttttctaccttgacgttacttagaaatgattttgataatcacgttcttagcacaaaatcaaatttacaattcctatcatcacagttgaaattttttaatcaactaaggaagcttgcttctgagcaatgagtatggaatttattcctctaagaactgactaattttaatcattaagataagaatgtcaggtgctatgatgttgataagtatttcacagctccaaatacatcacttccatggaacagaaaaatgataacatgttggagacaggaaaaaaaaaaacaacaactctatgattactttgggtataggccctgacctgagatcttagtagggggaaaaaatcatctttctaaagagaaaaacatcactgagaagacaatcttaactggatcaacattcatgttgaaaaaatgaatgtgctttaaaaattgaatagatgtttccagagctttggttcctgggaagaaataaaaacaactgttaagccaggtcaatgaggagaggagcagtgaagttattctatatctctagtcatctttgactgtcaaatttattgcatttttttcaataaaaattgtcttttgtttaatcgaatgcttaaacttgtttgcaagcctcaatgagcaggggatggtgggtttccagaattaggctgagagactaagacagacagcttggtattgctaggtagggtgctcataggtggtaactaaatgtgccagatgtctgctactgagttctgtattggaagtaaccaacataggtggaagggtatgtactttaagattgaaattttggttgatccacattttatcttcagtgataccgccattttaatagatcctcaagttaggaattatttgcttcctctgaatggccaaaggtctgtgataaaaaatccagggaaataaaatgaacccacttttttgtcagtgattcccatctcctggcaatccctgtgaaattcacactcctgggcagttggagattctactgacataaatcatgtgaaccaagtgtgggacaatgctagagaccaccaggatgaaatatctctgtttcaaactaactcttgttcccaagtagggcctcttatacctgtttcccagagcctataacgtgaagagttcatgtgaatgactccttcctactgagaaatcaggaaaggtcgggagggggtcacacctattctgacactcttctagcaggctgaaaacaggccaggtctgaatcacagtggaccacacagggccacagggaagggaaactgctttacttgaacaaagtcactatttcctggaggctgaagggggaatttcatctaaaattccctcactaggctcccaacaaaagcaataaaagttactagtagtgcctggctcctttattctatccctttgtttacttctgattaacattttacattcttttatttattttggattgatttttttttaaaaaatagagccactcagcttccaacctggaggctgactaaaggaagtagcaatggatatttttgagtggatacatcttcattcagggatgggcaaaccagtgcatttttagaaagtatttaggatgatatggtatctttccagataaagacaggcctccttctcctttgacaaagtgaattggaggcaatgtagatgttacttgtgtttgcaccctttgatgtgtagtatagacattgggcttcacctagaagggctcttcaggctgctgggctgacttctctttcccttgctgccctgctccaataacacttaccatacaatattccttttggcttgacacttctctgcttcaggttcctacccatccacccaacaggtccccgctgcagttggaataaaatctgcacctgacattgacctccaagattccatgtgacttgactcttgtttacatctccaaactcatgttatacccatccctccagctcaaacccacctcactgccttgggcttgcagttccttctccttggaatattctttccctgttcttttaaagccacagctccaatgtcatgtctttggagacactctctcatctccatctctcctatctaaaccattcacagcacaccatcttgttttatgccctttgcagtgtctgtcacatctgtcatttcttctttactaattgtttcttgacaagcagaatatgaactccaagatgacaggagcatctcatatagatggctatatccctagtacttgaaacacttttaggcacaaagttgatactcaataaagatctggcgcatgaagtaatagatgaactgttactatcacatgattagcccactgcaaccagagggaatgggctcaaatagcttcttttaatccctacttctaataaattctgttctcattgcatatattatttctccatcctttgctatgcccacacataagtgtcctttgtttagcttacacttcaaatctctgtttacttgtcatctgtaggaaatcattcttggctgtcccaaaccggattgggtgcttcctctacacttccttcagttagagcactactcacactgcataatggctccacagagtagaagcaattctctttctcttagcgtctagggtgtccagcacaggatctgcctgtgtcagagccttaacacctgtttgttgaatccatgaatgtgaatttagaatgtttttaagcatatccactttattacctttctatattgtacacagaacactcatgatacctatttgttgagtacatgaatgcatagttagaatcatagattgtttttgaacatgtcaatgtgattacctttctacatttgtacataaaacacccatggtgttccacaggaaaggcataagtcatcagcctggtgctttttttatctcctgtttaacctcgtaattaacacctttagagctcttatgttttgccaggctgcagctgaggcttttgcttgggtaatttcccccacgtcagctctaggaagtaggaagtgttggaactactaccatccagttgacaaaattgaagctgacttgcccagcgtcacacagccggtaagtgctgcgggcagaattggaacccaggcagtcatagatagtaaagtcgtcactgtgaaacacagagaaatggcacaacctcacggcaaatttgatatcaatgccaccagtaatttctgtgcttgctgatttagtgtggttacaaatatcatactttaaaactctgattagggtattctgcttttcaaacacctctctaacctcatgaagacctaaagaacaaattctcagctctccatgatagcaattaagacctgttacctctgctcccagtctgcctcagcatacttctcccaccattactcaacgtgagcacaaccttttgctggtctctaaatgagccttgatcctttctctctttgcttattcattttctcctttggcttctactcatcgttccagagcaatctcataattcttttttttctggtttccttcaaaacaaatttactttccatgtatttcaaacttactcattgtttaattctgaagcttgataggctgcttttatttgagctggaggatttctctccctccatgccttctgtataactgtaggaaaaatatgtcaaagagtagatgagatggtaaacaaataatctgctgcaaaatgcatgaagaataaactgggggagtaagcaaagctttaagtaacatgttcttaaatatgcaaaacaagaaattgtgttattagctcacattatgagaaatttacactaagttaggaagcttcacataaaataaaaataaatctattcagtttatatattctttgtcacctctttggagaaatgcttccttgttgcttccactgaatttcatatttacctttgttatatgtctcaccactgtggattgtatgcattgttgtatttctctgtctctcatcaaatttctaagatcaggatctggctctttgtgcctaggacatgctttggaacatgatatatctctaaaacaaacaaaaaccttgctacaaataaaataatacacacacctgaatggctaagatgtaaaagtgaaaaacgccaagtgtacaagctctttgccagcctatttggctgtgtctcctgaagttaaacatgccaaaaaacccaataattctactactgagcatatatagtcactaaaaacatgggggttgatggtcatcaaaagacttgttcaagatttacagtatcactatttgttatagtcagaaactggaaattactcaaatacccagaaatagaagaatgcgtaaacgaattgtagcatattgtggtatatgtgtacaaaggaatactatacagcaatgagaatgcacaaactaaaacaacaaaaagctagacacaaaaagtacatctgtatgatttcatttatacagtttaaaaagtggccaaatgaatttaggaaattagagttcagaagagcagttacccttggtggaagaagtagggactgcaaggtagcccaaggcagcttcctggtgctggtaatcttttgttcttaacctaagatctggttatacaactgtggtcacttggtaaaaatgaagctgagaatcttttctgtgtccatcttgtactttaacaaaaagtagagatagatagtaaaagaggaacaagggaggaaggaataagtgaaggaaagagaaagagaacatttttgaataaagttatttttttttaaagtcctttgtctttacaaaatcccaagccccacaatttacttcaattgtttattcagaactacaagagctgcatctgaattagcacaaaatcttacttagttggctgggaagcttgaatgggccttttttttttaatatggaaaattacatctgtttgaattataaccactgaattctcaatgtttgcgaagcaaaagatggtacctctaagaatggatgcatccttctaagcatccacatggctaccagtgagtgaacaaggaattctagctcattcagctgaaaacatagtttttgttagcttgccaggggaggcctgattgtcaattgtgcctgaaggaagtgagtgctgttaagcatagacatttctcctttgtgtacagtggaaatgatgggcacacacacctcctgctcacttgcagtgactggattctattcacaagccagtgctgccatctgacaatacttgcattggaatggccacattcataccatttctttagtaagctgcgaggttatatttcttcctcctgtcacagaagcagaatttgatctgtgtttgttggcgcgggtagatgtgtgaagatcaaacgcaagctttgtcaaacagacggtagtcttctactgaggaaaattactttttccccccattttcctaaggcaagtaagtgagaatgttaggagttatgatagtgttgaatttcagatcaggtaaactgacaacgagccctgctgtgaattggagtgttttcttttgaatgttttggcagctctttgaaagcagacagtaagcctcagactgtcagccgttatgtttgatattccttgatgtcgatactggatatgaaagaacattgtgcatttggtttaaaaactgtgtgtgtgtgtgtgtgtggtcagtaccttagaaataacttgagggcaaggtaccactaagagaatcccaggttatatagtcagtgagtaaaactatttgaatgacatcgtgagctacaaaccttttctagaaagggacacacctttactttttatagacagttaaaagcaattgtgtctgtcctacatgcttataagttttataattgtctttggtgtgcatgtcacattttgtgttcatatataaattcaattgccagagccccatctatgtgatgaaaacacatgaagcaatgttttattagaagaacgctcaacaatcaacttgactcttttcctttaatgctttgactaaaattttcccctaaggtatccagaattacttggattccttgtagatacaaaacctatgttttctactttgtgcttcaatattgtttcaagtcaaaacgtccctgggacatatatgcccttagttattatgtaagtaattaacagttattagctaaatattaatgtgcataaatttaagattcatttgattcattccagtagatttaacagcaagagggtagcactgagagatctgtggaagaagtaaatagcaaggacagagggagaagagatttccaaaggagtaaaagaatgtcttagcagtgttcttaatcattgtaagggagttacagactccttttagaattcgagaaagtctgtgatgtcctcagaaaaaaatgtgcacatatatgaaaatgcaaaatgtggatgactgtcttagtttagattccccagaaccagacccaaggcaaaggtttgagagcaggtagtttatttgaacagtaccaggagcttgggtgggtgaagggaggaattgatgtggggagaaaaagcaggcaagaaatggtgtattattaaggcgctttccataaaagtgacaaaagtccggggagaaactctacaaaacaatgcaaaacagacacctcaatattatctcagccagaagacccaatgcccagtcattggctagggctgccctggtaggatgtgaattcacagacacagccattggcaatgcacagggcaatatgggttctgagcctagggaatgtctcatgacaaagatgaaggtgttatccccaaagtggtgtgtgctaaaaaaagaaaacaagcaaacaaaagaaaaaacagggaagaaaaaaaaaaatgcaggttatggacatgggaaatcaggctggcatgcccagcagtggtaagaaaaatcaagaacctgtaggtatgcagtgtctgctgtagatatgccttgggatcccctattcatcctttaaaggtcagcctggaccagtttattaaagaattctgctgtgtggaaagggccgcctgaaagtaagatgcccattttggagatgagttcagctattaacatctttgagaagggccaagggccaagttatatgcccaaccatgttttcagcttgtaaaattattctagaaggaagggatttagtgagtcagtggacaccttcagaaagagtgttgggagtcttgagaactctttaaactcttctgactcactgtgtctcacagggtcaggcatgtgatctctctttatgagagagtctccatctagggaatgggataataatggtctttctcattcttgagaaaaaggtgtccaggcccatgatgccgtgagactgccagcatcaacgcccctgtgtgacactcttcctatttgtaatctcttttccccaagcaatgagttgagtcaacagagcaatcctatctcagacttcaggaaacgaaatctcggagcatcgggttggtataccagagtcatccagtgagtcactgtcacagtaggaatcaggtattagaacatctaaactccaggccattcttaaactcctcaggctttaccgtctcctcctaaaaatggagaaatgggtgctaataataggcctggttctcccgtgagccagaatgacttattcacaacctgggaacagagtcatctaggggaggtgagttaaccttttttggtgataatttcctgacaaaggatgcctaaaaaccctggaaaatggtaatagttcatctactgttcctgcagccgctggactgggatcttaagcagtctgacccattttatactcatatccttaatacgttgcttcacacaatgctttttggcattaatggacatgatcaggaagcctgctgaagtcttttgaaactgttagatgaacgaagaaatggcagattgcctttggaaacacttgttactttcttataatgttaaatgtgcacttatcaatatggcccagcaatttcactcctgaggattcacccaagaaaaatgaaaaattttcacaaaatttcacacaaaaaactatatacagttgtttatagaagctttattcataatcagtaaaatctagaaacaatcaactattgaataaatagctggtatacagataacatcctgcagtgcatccagtcaatgaaataatactcagaataaaaatcataataataaagtactgattgatgcaacagcaggcatgcctccccagcatactctgtgatgtgaaagaagccagaaatgaaagatgacatactgtataattccatttgtaagatagtctaaaacctgtataagaacagagaactgatcagtggttgccagggcctggggtttggggaagtggttaactacaaaggggtagacagggatgttcacggctgaggaaactgttctgcatcttaattgctgtgtcagttacaggactaggtgcatttgtcaaaataaggtaaataaattacatctcaataaactcgactcacacccaccaaaaaaataataagaaagaaaaaatggtagagccatgttaggtcaccaaggtagaggtgacatgggaaaagagattagaaagacagaagtgtcataagggactctgtcataaagaactcagacaataatgtaatagtatgttgtggtatttctttcagagccaatactctggccagcaggaacccaggagcccagaagccccaggcctgacccattctggcaattattataatattattcttaaaagccaagtccgtctctctctctctctctctctctctctctctctctctctctctctctctctcaagtccctctctctctctctttctctctctctcccccatcactctatctttctcacacacactcacatgctcacatgatcacacacacacagagaataacaagctttgcaaagtgcaaacatttccattgctgccaaaggtcaggctgaggatgaggctcgaaacctcgaatttgtccagctgtcatctcccagtctcagtcaatactgtgaatgtccagttctatcctgaacatatctacaaatacatctacttggaaaatactggcacataaatttagagaggtttaaagtgggaatgaatacctcaacctacggggtggaaaaaacctgtgccctgctctttgtgggcaacccaacctgtttgaactgctaaaaacactcagggcaaaacaaggagagcagaaaaaaataagcttttaagaaaacagttctctcaatatccctaagtttaatggctcaatatttagcatgcgtttcataactccagctttttttgggtggaggtaggtagggaaaatgggaatatagtaaagagttttcaaaacacttgctatttgtaaggcttctttttttatgtaccataacgcacacagccctctcaggcatggggtcaggctgtttccttggagtggaattgaacacgaatgaggaatagtgagaaactgggttaggctaccatggaaaatatgagagccctggaaagcgtcattacaaggtctgacaatgattccagggttactggagaaacttttttttttctcttttccctctttcctccaagtacccagatccctccaacaggatcccagaagtgtgacactaacaatgaattttcaatgcatcctgcacccaagggatttgcaacttagtgggacacacatgttaatagacaactaaaccagtggtcacaacaaagtgagacaagggctaccgcagagaggcagagaggctggaaagccaattgtcatggatatagatggtcatcgtttctgtctttggctctaccatatgctagctctgtggctttgagcaagctacctaacttctctaagcctcaaaattttaacctgtgaagtagagataataatagcactaccccaacatgtgattgagggttaaatgagaaatccattcaaagcacatgaatagtgcctggctcatagtaagtggtcataagtggtagccatgacagtaatttcatgggaagagagatcacctcaggaaagcttcaaagcatcagggatgtttaagctgagtcttcaaggaaaagtaagtacaagctacatagacccagtgtacccgcttgtggaactgggaggacatttcaagcagagggagaaggatatgaaaagggttgtaggtggaaaatatcctgataagttcacattaagaccagattaagatctctggggaatctaaagaataatggaaccatggtacaaaacccctctcaaatgtattctaatatcagtgttaaatctgaaagtaactgggaggcacatttctgatttgaccttcaacaactaggttgaatgctttgtttcttcaagagatttttgcttttgtgagtacctaggaatgttgaatctccttgtagggtcatccagggacctcagagttacctatgaatggagtgggcaaggattttggccaagactgaaatatgagcagaaaccaaactgtgaagggtcgttgttgggggctttctgaggagttgtgcagggaaagtttggtgaaaaatttcaggctggttgcgtgacatgcaaaggtaactctggtggccttacaaggaatggatttcagtggcagttctcagtgggaaggaggggacttgttgggagatgaaaacaatctgagaagccttttagcaatgcataataacccttggcttttaggggcacagtgttgggaatgcgtagggggagccaatgaggagatggaatgagaaaaatcctaagaaaaattattaggaggctgttgaaatattatctccctccctagccttcttctttctgcccgcatttctgtcggcttaatttcaccctgtcattcatatatatatatacatatatatatatatatatatatatatatatatatatatatgacacacacacatatgatttttatttttatacattatttatacatttgtatatacattatatatactaatgcgaatagtatatacatatgcacataggtatatataatgtaatacattgccaaatgtgtacaaacattctaaatgactctttcgcacttacatcaacccgtagttaccttcccgaatctaaaaccagaagcaaatcttatttttatttatttatttattcgtttatttatttagagagggaatctcgctgtgtcgcccaggctggagtgcggtggcacaatcttggctcactgcaagctccacctcccgggttcacaccattctcctgcctcagcctcctgagtagctgggactacaggcacctgccaccacgcctggccaattttttgtatttttagtagagacggggtttcacggcaaatcttatttttacttttattttttgtagtccagaattacagcaccatagagacgaaatatacaggtgagggcgggagcttctccactcagtctgtgcatgtgggagggtgggcaacttcctgccagccttctggtctcatatgcatttggtgaggatgttgcaatctcagttagtttggggccatgtttgtacactaattcagatgtgagcatgtgtgctcacatacacacaaactcacacacacacacaaaattagagtgaaatcagacttaatggagtgtggccacctaaagacttcagagctagcagaagcgatcagcaatctactagatgagtgatttggtgggggtgtcgttactattctttcatgccatggaacaatacatagtattgtcatgtcaggtttaatgattcagcaatttaatatccttgacttttttgtggagttattatttagttgggaatatttttcaggacccagaagcattatgtttttgatatgtttggaacttgatctaagatgtacttcagacaccagacagtgttttatgttccatgacgactctgaaattcatgcagcttttgttgtctgaactttcatttgatctgtgttaattttttgtattaatagcttgcctcttcattttcattattactgacaaatatttacttagtatctactacatataaaatatcaggtaagtattctgtgtatgttcaacttgaaaaactttctaatttggcaaaacatagagactaatttaacaaatacccatgtagtaggatttcagaattaacaaatgccaacatttaatcatattttctcgagataaacaatgtatgtgtgagtaaaagaaataaacatcactggcaaaattcaattatttttacttcctaagtttttatacaaaatggctaacaatttaagtttttgaatagaaggattcaatatttacactacttaatcacactgttcctggtatctatgcttggtacatagtagttgctcaataaacatgtgttgagatgttttgtccaattcttacatagccaggattgactcctatgcccactcttctatactttttatacattttatttgagagaatacatttacttgcacgacttctaaaaacatctataggccgggtgcggtggctcatgcctgtaatcccagcactttgggaggctgaggtgggcagatcacgaggtcaggagatggagaccatctggctaatacggtaaaaccccatctctactaaaaatacaaaaaattagccgggtgtggtggcgggcgcctgtagtcccagctactcaggaggctgaggcaggagaatggcatgaacccagtaggcggagcttgcagtgagccgagatcacgccactgcactccagcctgggcgacagcgagactctgtctcaaaaaaaaaaaaaaaaaaaaaactataaacatctgaaacatctatagatatagctagatgacctttcaggcaagttaatctttccagacctcagtttctacatctgcaaaatggaaataaaaattacacccaactcataggtttattgcggggcttagttgaactaatgcatgtgcttactgtttagtaagtgctaagtaaatgttagttagtgttactccttttattgttttttaaccaacacctttcttcatgggttcacagtccactgcagaagcaaacagaaatatttacaacttcaaagtgctgtgatagacgttagtgcaaagaaatgtagataagggagtgaacagggaagtgaggaaggcttcacaatggagaggtgaactttgattcattttctggagaagaaatctagtttcactaagtgaggaaagaggtcgttgcaggcagagggagtagtatatgcaaaagatgactgcacggaaatggggaaatgggcttatggtaatgtctcttaggaggtgagagatgggttgagggtacagagggtaccatgcaaaaaaaaaagaatagtagaccaaagagtgtacaactccatgtgtttgtgcgcatcggggcctgcttctttattgaaacttacattcaaacgttaaatattattacactatgtaagaaaagacgtatgagtaatgctcttccaccctcctccccctcacgttcccattcctgcagcactagaaacccactgatatgtcttcaagggaaaaaccataaatgtagtgaggatgctatgatatgagttgtcgtgatgccactaacgttgatgaccaggaccatggagacattggcaaggaatttacagcttctcaagttccaataatcttattatagtctagtgtatgcaatacgccttcttacacatctgtcatctagctggacccagtgggaaggttcatggtctttggactcagagagagcaatgctacaaccctggctttgttttgctgattattctccatgtggtccctggaccccttctctcttttcttctgccctgctgttgcaccaagaggttgacctcagggactacattccctggctcctttatcctttggctttgattgtgtataggcaatgagagggtctagcaggatgcaggatggcagtaagagggagaggctgggatatttcttcctcttgcttccgccttgcttgtctgtggttctaatggtggctgtgctcctccatgctccagctccagacaggtgtcccatctcctttgcttctgccttgctccagtgacatccacttcattcccatatctccttgggctcccttgcttttgacagttccagtgcctggccattccctgttggttgttttagctctgcccacagatccataaggagcccctatattaagttattctcaattaaatcctttcaatatgtcatctctttcctgctgagacccttaccaaatcaactacttactacatgactttgtccaagggccataatcttttatggcctcaggttctccacatgcaaaatcaggataataatgttctctacctcatgaggttatttaaaggaaacggtgagatcatgtgttttgatagaatatattttaaagcctctatcatggttcttgacacataggaggtgctcaggaaatattaggtactattgtcattgcaacaattaggaaaacttctgccactatttatatgtgatagaattgagggatattagatctggaaagtagctgggccattgccttggatgacctgctcattttatgtttgaggaaactgaggcccagcatgcttgtccaagttcacacagttaattagtggtggagctaagaatagtatgagtctacattgaaaggaggccagctgtgtttacatcaattctatttaacttctttaattaagctgttgattccttcagtgacgtcacccacttgttttagaaatgagttacataagcgcgtctccctccactatttatttgctccctctgagaagagtatcgggctgtcccaaaataagcaaagattcgagagaatacccctgtttcattgcttctgctccctgctgctgactcatttactcctgggcctctgagctcgctcacatcaatcacccatcctcagaagaacacactgcgtccggcctcacaggccccgtgcagctggagctctgcaatgccacccctgggaggcttcattgcaatgcaaggaaaggccactgtcaggtcctcccctctgcacagagcatggtacccagctaatgatcatgtccagctaaaaacccttttggtttttaaaattcaagtcaggcaatcccaagaggaacggcatccaaacagatgtgtcttttaaccacacagttttaaaacaactggataaaaagaacatttgttccatcttcctactaccaggcattcaaactcagttttaaataggtatacaaatagctgggcatttcaggttgatgatatccactctcagggcaagtggctaatttccttcctaagctcgaataataaatgcctaatcatctttttatttttcctaaacagtaatgtgctctgcatccagtctgtgtctgtctgccggtgcagagctgacattacctgatcctatttcacagagaccctgtgtttgctagatgtccaaataagtggttgattcagggcaaaaatattagtcaagccatttgtttcactcagttaaagaatcagtgcaggtaaagtaggcgagtcagtagcccagcgtaggcaaagctgcgtgtcctcgaatgatctttccagccgtcattcctgggagggctgggcttttggggcactcctaaaggaactgccttgggctcaaggcaacattctctctcagcagcttctccttccccatttccagtggttatctcaactacttcaacaggcaaccttaaagccagccagaagcaattttagtttatcaagcttgaatgtgaaaaggagcaagcaaagacctgagctttctcttgtttcttttcttatgagtaacatgtgatcttttaaaaattattgtagtaagaacacctaacatgaaatctaccctcttaacaaatttttaagtgtacatgagcctttaaaacaaaacaacctgactttttaatgatcgccattctaactggcgtgagatggtatgtcattgtggttttgatttgcatttctctaatcaccagtgatgatgagctttttttcatatgtttgttggccgcacaaatgtcttcttttgagaagggtctgttcatatccttctcccagtttttaatggggttgtttttttcttgtaaatttgtttaagttccttgtagattctgtatattagccctttgtcagatggatagattgcaaaaattttctcccattctgtaggttgcctgtttacaatggatgccagagaggatgtggagaaataggaacacttttacactgttggtgggagtgtaaatgagttcaaccattgtggaagacagtatggtgattcctcaaggatctagaaccagaaataccatttgacccagcaatcccattactgagtatatatccaagggattataaagcattctactatacagacacatgcacacatatgtttattgcagcactattcacaatagcaaagacttggaaccaacccaaatgcccaccaatgatagactggataaagaaaatgtggcacatatacaccatggaatactaagcagctataaaaaaggatgagttcatgtcctttgcagggacatggatgaagctggaaaccatcattctcagcaaactaacaaaggaacggaaaaccaaacaccgcatgttctcactcataaataggagttgaacaaatgagaacacatggacacagggaggggaacatcgcacaccggggcccgttgggggttaggggactagaggagggatagcatgaggagaaatacctaatgtagatgacgggttgatgagtgcagcaaaccaccatggcatgcgtatacctatgtaacaaagcagcacgttctgcacgtgtatcccgaaacttaaagtataattaaaaaaaaaaaccctccctcccccacaaaaatgtggggcacttatagcatcgaaaaggcagagataaagaaaaaggaaaaagctaaaaagtaatttaaaagattgagaaaaccagtgtgaacatttcaaacgtagaggaaggaaactgctatgcatggcacacctactgtgtgtcatgcatttctgcatgcactaacttatttaatttttacattaaagaagtgaggtctgtgataccagagtgcctgtgtgcattggtgtaagttgttcactgcacaaggggcacagtgaggacagaggggcattggaacccagcctgtgctctgcccaacatgctgcaaactggcctggaggaaggggcatcgttttctaatttgcacaaagatattatcttagtctgggttcccccaaagcaagtgtgaggcaagaatttggatgcaggcagttttttgagaggtaattctggggagaacagtgggggaagtaaggggagaaagggaaggaaggaaggccacatgaatggatgagtggttacccttatgagcaactgaggcttaatcccaccatggaccctctaagacagtggtcatcagcttttttggcatcagggaccagtttcatggaagacagtttttccacggactggggtggtgggggatggtttggaggtgattcaagtgcattatgtttattgtacacgttatttatattatgattacattgtaatatataatgaaataattatacaactcaccataatgtagaatcagtgggagccctgagcttgttttcctgcagctagaccatctcatctgggggtgatgggagacagtgacagatcatcagggattagattctcataaggagcacacagtctagatccctcctatgagcacttcacagtagggtttgcactcctatgagagtctaatgccctggctgatctgacaggaggcagaacttaggcagtaatgggatcgatggggaatggcttaaatacagatgcagcttcactcactcaccttctactgtgcagcctggttcctaacagaccatagactggtatcagtctgtggcccaggggttggggagcccagttctaagagactgtgtggaacatgctcagagctgtcccagtgaggggcaaagaacttgcggtattcctgccatgttaatttccatacctcagaagttacgtgttgctcctagggcaccaatgccttggcacatgggtcaagcacagtcctgtggccagagagcaacctcaggcagagagacacaggagaccatctgtgtgttgagaactactgcagatgacctcaggtgacccaaaagggtatgatgggccctgctagctggaatactcagagatgtgggtagataacccacatacggacatgtgtttgttcactggacattcgtttttcaactgttccttttatagtacaatgattgtaaaaatgtcagctgtcttgcctttgaaaggagagttaaatagcaaaagaataatccagaaggctgggtgtccaaccgcattccaggcccagaatcattattttgtgtcgtttacataaattctcagttatgaatgattccattttaggacatgaataggctgaacttctactgcatatacaagtttttccagccttttccatctccctgaattagttcattgtgaaataggttgcctgatggctgaaaaagacaaaaaacttcaagagttttggcactcctcaagtcttccatgccgcctctgtttgttgtatagtattagtgaatcgcaatgtggcacacaccgatcatcctaaaaatatgtccagaaaagttgcatagattgtgtgtggccctgtgtgtgtgtgtgtgtgtgtgtgtgtgtgtgcatatgtatgtgtatgtttatacatctagcttcttcccccattctcccaccaacactgtttgggtagccagccccccatcctctctaaagcccccatgccctgcagtaaacactgaggccagggctgtgtggcaggactcccagccaagcaatagtaactcctgctgctgccttgagtaaccaggaattctccatgtctcatgagtcctgctcattgggctgacaaatggtgactgagaaatactcgccttttgtggtgtcctttgttgtttcatgtgtaatatgccctaagcattttatgtccaaagagagaaaagaagagaagagggaaattaattccaatttcagcaaggtgtgaggcaaagagtatcatctgggggagaatgaagaactatgactattcaagtggcaatgtcttatggttaattaagtctggtgttccgttttagaggtgaaaactgagaccaagggaactgaagtggcttggtcaaagccacgtggactcttgggctctggaccctgtctcctggctctctcttttgcaacaggacgcttgtgttccctctctggtcttgccagcagacactccctctgctagcctagagaagttatttcacatgctggtcgttctccatgtgtccccccagatgcatcctctgcccttctttgtcctgctctgtgcccaggaggctgacccttgggacccacttcctgtgcctcctagcttccgtgatgtgagagagaagttggagtgtttgtctccacattccttcgggtcagttctggtgttgacagtgatcacaccttcgctaatggccatgaccccagtcagtggcctccctcccgtggccgcagctctttctgggttctgctggcattgacccttcccctctgctctaagcctggggatggtacaggctcccgctgttgctagcccctggtggcttagccccctgttgcttcgcttcatcctgtccacacctctgcatgcagtcacttctctagagtcttttccgttcagcatctgagtggactgggaacttcctgccaggccagaaggatatgctgaagggtttcttcctttgacaaatggggataacaacagtctactcgtggttttagtgaggatcaaatagggtcatgtgtgcaaatgtgctgtgtctgtctggcccagatgaaggtttgtcttcaccagggatcatataaggattttcggccaatcatagcttatgccttaactagtttctacgttggcatattgcaggggcaccccaaccacccctcgctatttctcaggtcagccaaattgataccatgtagcagagccttgcagttttcactttgaaggctgtgaaattgtggactcatcccttgatctggaagcaaaactgggagacgtcacacattccagcttcatacctcaggcagctgccagcattgatctgcgaggagggccctgcctcttctgtctccacctgttacttgaaagccagagaagagtgactcatcagcggcctaatgcagcaaagaagacaaataagtctcagcaggtagggtgtccccaaccatgctccactcagagttctgagcagcagggtcagcctagggaaaaaggcaagtgggaaaagtctactccaagggcctcgtgccccaccccgctctgccagtctctgcactccgacatgtagctccccccatccgcactctcacctgccccatctccagaatactaatcctcaatcctctaaggacttaaccaaagaacatcccacatccttttaatgacagcctattaaacttggtaaaattctgataacatgtgtgagtgcctaaaacatgctggtactatctcagatgcaggaaagacaaaaatgatcgagacatgttgtcatttcatctctgccaacaaataccattgtgattatctgtgaaattaactgattacttaaaataagcattccaaacaacctgctgatcagagggggccctggtagttggctctagctgtgctttgttagtggttgagagtatggaatttggagccagtcttctctgcatttaaacttcagctctaccaggtacatgctccatgacaggaaggaagtaacaactgctctgtctggagagttgtgctggagccaactcaaaaaagctgattttgcacatctctcccaactctgtgttcaccagcatcacattggtagtttaaaatctatgacgggccgggcacggtggctcatgcctggaattctagcactctgggaagccaaggcaggcagatcacttgaggtcaggagttccagaccaacttgaccaacatggcaaaaccctgtctctacgaaaaatacaaaaaggaaaaattagtgggcatggtggcaggcacctgtagtcccaactacacagaaggctgaggcaggagaattgcttgaacccaggaggcggaggttgcagtgagccgagaccgcaccactgggctccatcaggaagacagaataagtgagactccgtctcaaaaacaaaacaaaacgaaaaaatttctatgatgtagtgaagatttacccccttcagaaactggctggcaaatgttacacattggatgggtttctttccttttcttttttcttttctttttctttctttctttctttctttctctctctctttctttctttctttctttctttctttctttctttctttctttctttctctccctcccttccttccttccctcactccctccctccttccttccttcctctttctttctttctctttctttctctctctctctttcttttttcttttcttttctttccatcttccttcctctctcccctctctctctctttctctttctctctctctctttctttctttttggcctgtggagtgagctgtgagatttaccagcacatcactgactttttacttcattcctcatctctagaatggcaaataataacagtacctgcttcattggattgctgtgagaattaaatgatacagaagatgttcatgtcacaatgtgtttggtaaatatatataatctgctcttttaattattttaatagtcaatggagtatctgggtttcttttggttaatgatgcagcaatcagctgtcctagaaattgcagactgtgctgacctggagggaggaagacccttccaaacccctatccagactcctataagactcagatttttaaaacaaagcaaaacacaaaagcaactctttgcttgcggatgactcaacttcctttttggtaggctcaactctgcttcccaggaatcagcagtgattagtgatagaaagagtagccctcatgaccccaggtgaccatcaggacgctagggcaggaaggagcctgttgattgagtgctgacctgcaaaattaccagcacaggtgtccaacaatttcattcttgagaagccagagttgagtttctggggttgctttggagggttcaggacatgctgcagggtaataggaaggacatggggtgagaaaaaggttcctgccaagttgctgaaagacacatgatagctcaacagggaaccaagagtcaggtttaatattgtttctgcaccacacttaataattgaggtcaatggtttatcaagtcctcactgagggccacagagaggacaggcttctaagtgcagagaggcagcagtaaaggctgaggctgcgggaaacataatcagagtttaaaacactaacacttacctgctggtatggttgagaggcattccaataacccttggcccctgacttttcactgtgccaaaatctaaactattacactaggtcttgaataacttttgaaaatgtgtgctttcccacctagttaaggcaaagttgcctcaaagacaaatatcacattagcacagatgctcttataagagcaattaccatcaatggtcactgcctggaagttggacctggaaatgacatgctggatggtcatagtcttgttagatgaggtgtgcgtgtgatgataagtgggaaacagcttgatttaagggacactttagtccatggccagcacagtaatgatcttgggaagcctgaagctatgtcttctgttgagcaataaggtacagggcgcagaaggggcaaaataagtcagggagtccagttaacatgtgagatggaaacttaaggatagggacagagcacgcacaaagcccagggacacagctttttgctggacattttgcctgtactaactggtaaattagactgcacaacaggaaagaagcttgtgatagcaaaaggggtcgaaaacgggaaggacactcagagggcaggaactatgacggggctctgcggccttgtgggcagcagggagagtgtatttttggcctgcgggtctcgtgagctggaagaaatcaggaaagggaagctgagcatttaatcctacatagatcacaggctaatcgtgcccatttagtgtttgaaagtgagaagttgtcaaggctttgtgacagccttgaaaccgcaggcattagaggatagaaatcctgagcccagagggaggcaggcactcccatctgcccaatttggtcttcaacagcttccaactcttcaatattcccaagcagaatcagattaagcagaagtgctcataatagttctccaatttagcctgtatcttctctctctttcttttgtcctgggggccatgtgccattaggagcagaggttgtgaatgttccagaaatccctttgggatgcaggccttcctcccatgcagaaaatgcctactgaacacactaaatgccaggcacatgccttgtactggggtgcaatggtgaggggtgacacccagagggagtgtccccctcttctgtattactttttgcctgaccttttcagtagacttcagagttggtcatcatgacttcctgaactcatctccttccatctttctctcctgagctctgagaagcaaagtcaattcaaatccaaagtgctgggcataggagtttgtttcgtaagaattcaaactttattgttttacctctaaatctggcctgcttctatagtgcttgagacttagcaatctctcactactcttagctgtttttgttgttgtggctgtcaatattatttaaaactgataaaaactgcacagggaagttgacacagtcagatattaagttgatatgcctatcattgaatgtctggagcaaggtaacctcacctcagacttgattcctaacaaacttcagtgaatattcaatttttgttttatcacaaatgtattattacacctgcctatatgggaaggtgaagatgggccagttgtttgctttgaaaggaggaaagagtgagaatgtacaactgaatgaaaaaaaatattttggccacagacactttttctcttggctttacaataataaaatatgtagtgggatttttattttgctttagaatttttagttgttttttcctttttgaagtgctccttcagaggaaacaaatctttctattgacattgaaaatgagtcataagagaagtgttgctactttccttttgagggattttttttatttagttttgtttccattaagttttagcaacaggaaaatatggactttcagcatccacagggatatgatcaaatggaaacatatgctccctgtttgtccattattacaaaccatgagaaaactcacaaatcactcatagactttctagaaaggttgatttgacaaaatatttgacaaaatagcctactgcttccttgatatttctgaaaccaaatgagtatttgtgttttgaaaaagcaaagttgattaaaaaaaaaaaagcagctgatgaaaggcccaaaatgcatatgggtcaactatgtttattgcagaaacactagagagtggatgagagatgggtcagtgggcacagaagcccacctgcaactgcactcacaccttggcctacattgccaaagagaccaatatatcagcaattgattggaaataccacaaagatgaatcacagatcaggaaagcaaatgccaatcaatgattgagcctaggcaataatatatgagctaaaggcatttatcaaacctgtggaaaattagaagacttgcctaacatggctgagaatgctacatatgaaccaacttttagaataattcagtcttttttttcagtcccctagaataaaaagggcatatctaaactcttgaatttattttgattaaatcaagaattccctcctgtatcctcaggatctggtattgagtagggacacgataaaacacttgtcaactggaaggactctatcagcagcacctgggctccatttgattttttaacctgcttagtatttccaaccgtaatgaccaaaatgtctgccttcagttacagtatttgtaccctgaggaaatgaaataatttagccccctggccctccaccccactccgttttctcagctgcaaacaaagggattggactttatctggttgctttcagttccgtaaaagagaggtcaaatccactttatgttgtcaaggattctttttctgttttgtgagatacctggtttttagattcctctccctttttaatttttctccagttcttcctgctttctgcatcctcttcctgactttccattgttttctctttaacaatcacacactagaaaatatgtagaagtgagtgaaaaatacatctcatgctctgtttagtgtatcctcaaaaagacttcatggtaaaagggtggttaggatgctgtgttctctgtgggtttctacttttattgtattataatttatattttcatgcttactacaactctggctgtgatttatttttctatcccagatatggtgaaaaataatactaatatgtgtgttttttgtttttagctgggtattagcaaaaatcattccattttccctgagacatcttgctccaaccaccttgcagtgcagctattttgattacttcatgtcactattaatcatgtgcttaaaggaaatagataaactttgaaacagaattcagctcagcaaaggtttattcattatctcctgggtgcctggctctggtgctaggtgtttagagggaacaaaggtgagtatatcagggcctatggtggagacagcaggagaagctgagtgagaatttacatactctcatgtgtgacttatgtatcaaaagaaaggcccaaagtgcttggagtattaaggcaaaggagaaatgatgtatgtgtatggaagtgatttgtttgggtgaagtccttggggtctgtgagagcgaagcctttccatatcctggagtgcttgggtgtggaattcaaatcttcctcagttggcaaaggggtaccaaatggaaggcttttacccaggaaaccatgatgccactggtgctttgggaagatgaatctggcaggagtatgcggggtagtccagggccgggggagggaggcctggaaagagcctctccgtgtcctgatcctggttgcactgcttctttgccaatccctactccatgtggttgcagcagctcacagctataaaaatgtgttgacccaagaggtttaatattaaccaaagttatagtcaaagtcaatttggaggattcaagaaaaaatctgatgctaatagagaaatagaagtcaatatttgtaatgtgagtcacaggctcaaaatagaaaagtaaaacacatcactgctacagttcccagagggctgtgggttacacagcgcagcagatctgtgaaccaggcctcaccaccctctaggtctattttaaaatttcctctggccccttcctctaattcctaaattccagagcatgatattctagtggaactcaccagatatccagccctggtgaagtcatagcttgttttgagtgggtcaatggaaaaaaaagatttttttccctagttgtgtataaccttcctctctagtgacgtggcatggaacgaacttatcatgattttattttgtagtccatacttcattctacagtggctatcactgtttaaaacttcatctcttatgtgttgcctattttgaagaaggcagaggagaagagaggaaagcagaaatattcagaatgacatatattttttgttttatcacaaaatttatatattaatagcagagaggagggtgttgtccactggaggggctatgacatgttgaggagcttctagaattttctttaacaggatggcttttgtgagcgttcatggcgtagctttatcctgactcagatgttaatcctgcacagaggcttgaatgtgttttcctgagtgtgatcagaaaatgaaaagattcatgaagataaaggaaaaaaaagagcaaaccatagcatgtatacccaatgatcagcagttactttcttaacagtgcttcacctagtttatgttgtgggatgtacaacacacaaggctaaaattagctgctcttcacccaatgtgttggaatgctatagggccagatagtatcttatcacaagtgaccacaggaaggacaatgcattccaaactgagtcttcaagggccaaggcgggtttgatagagtctgagatttataacccaggctgctgtacatgaatcctctggagggcctgagaaacgtgtgatacttagttctcccttgatttctttttattgctttgcaagaagcccagcttataaagttcagtttgaacactatctgcttcaaagaggggcctggtgatgagaccagagatgatcagataagaaggaaaaaggaagtggtgaggatgggtgcagccagaacagagtggactggcagctgatgaaccaacctgggcaaggaagtagcttgaaggctgtgtctcggggttggccatttttcctcctttctcatccggaccttgtcaagatcctgtggtttatcataagttaccaatgcccaaccagtatctgcttcctcatcagcacgatggtcatagccccatctccctcgcagcatgttttcagaagtaattaatgcttgtgagatgttttgagatcactgataaaagacattctacctgcccagggtgttattacattatcttattttcctcttcatagtcaggatcaaacccacgataacttagaaatgagacaaattagtaaaacgtggtatgtgaaggctgccttaacaattggatatgtattgaactgggcattgtacttgaattgtatacacaaaatgtggtgctgggctacatcttaagaaatcttaattactttcagattctgtcaggttacatttcatgactctacttagatctccttagaaatggtaaatcattaagagcaaggcatccactgacgttgcccatcaaaatggacttagtacctggccccagaaatgcccaaactacacatgaccttttgcgcatttatttctgtctccttagaggactgtgtatctctttgaagaataggagaatagacaggatatatagcaactggtaatttcagtttatgatgctcatgtgaaaattggattgtcaccaaaacccttcagggtacgatcctcctcttacaaaactcagcactgtacttcatgtgaggcatagattaagaaagctttttccttctccaaggaaggggcactgccttgaaagcttacgtggttattaagagtacttccatcagatctttcgaaagaaaggtggagatgaccaaagggcagaaggtcacctacgtaataagatccacatgagacaataattaaaatggaatgcttaaggaggatgcacgtgtcctgaccatataattctcgataaaattactctaaattgatctccatttaaatgagattttccaaaaggccacctcccatttcatctaaaattctttataagaaattcacggatgaaactcaggggataggaaatgtcctgaaatgaatgcgaaatgttatccacttgtgcatttttctgggaaaatagtttatccccctttccttatatttctaacaaacatggtccatgacgcttaagaaccacagtgccatgtgaaatagtatagattaagcgtgtgaaattgatacgcagtgtaggtttgtttccaaatgcagattaggcattttattttcagacaatatttagttgtgttttccttgatgccatgctgatttttattttcctgtaatcctcatccaatcacaatgttccaccaaagcctgaaggtgcatataaaatatgtgatgtgaccttttacccatttggagatatagaaaagcatcctaggaggtgtgtcaattacagcccttctcaatagagaacaaagatcatctcttggaatatggcctaaggttatggggagggggacggggacaaaggatcagtgtcaaggtggggctgaacccatgcattctaatcagttgccatttcccattctccatcccatgcaacatgcaatgctggcattttaaccaagagatagatgttagggaaaggacaggtagtgcaggctgacaccatagatcttggaacagggcagggacatacagctcagtgtttaagggcacttaaactctgagttgggagagtaagtttgggtaagacccaatgagccatgtccataagaatgtttgacctagactgaagatcaggctggagataaggagagggagtagaaattactccccagcacagttctcttaggaagtggcctggatgtctttgaaaggcataagctttaagctccccttccatcacatgaatggtgactggtgtcatgagtgtgtataccagggaatgtcccaggccacgtcttgagtgagcaagggttagctaagccatatcacgtagttcgtctggtgaggagagaaactgagattgagaaaagcaagaattcaaaggttacattgcatatcagcatggctgcagagaacagcagctatcagtggtccgaactacagggtctgtggtagattatctacagagataacaggccacaacttctcttaagtctgcatattcgtgccgcttctcccatcaacagggggagtctatttccgtacctcttgaatctgggttgatcttgagccttacactaagccagcttttgaatgatgcagaagggatgttctgggatttccacactcaggccttaagagatctggtagcttctactttaactcttactattctgagacaccacatgaaaaagcccaggctattcagctggagagagaggctaggtggagaggaaggccccggagcataagagaccacatggagatctctcaaggagaggccacaaggagaaccaaggtactccagcagccagccagcaccagggccatattagatcctccagctcagcccagcccagcccagcccagcccagctcagccgacagctgagtgcagctgcattagtccagccaatcccatgtgaagtagagacaagctgttccactcagccctgcccaaattcctgacccagaggatcatgagcaatgaaatgattgttgttttaagccactgtgttctgaggtgatttggcacacaaagccatagataactggaacaatgtctgaatggtcctggggaactcaggcagaattcaagattgtaacctcttggatatgctaagtgaggtttggaagagggaagtttagacagaaaagtgccagccttgtggtctttctggtttaaaatgaaaccccagaatctccccaaagtacagctttttggggagaagactggcaaaaataagagtgtaaaggcttttgtacggactggatatgcatatgggagacaacccattcatcttccctcttgctggtgaggagacttctaatggtctctgtcttggtcagaactggtgtaggtagccctgcaggctggatgctggcatggcaagcggtgttatttcaagcagctagtgctgttcatacaaccagctcatgtgccctctgcccagcagaagacagaggagaagcccagcccaccaaccagacactaagggaggttttgtgccagacacttggcagtcaccttaaagagacaaaaagataaataagacatagtttctatttgtgaaaagtacacgatcttgggtttcactttttttatatgtcttcctttcagagttgcccttggtgtcaaattgcatcaaatctcacctagccaaagcatggcagggattcagaaatctcttgggagagctgtcctaggccctgctggcgtctgggacaagaatgcaagcctgagtgcatatgctacagctctgtctgctggcatgagagtgtacaggtcttcgaggttttgcaggtaattccgatacctacacattttatttatttatttatgagtcagagtctcactctgtcacccaggctggagtgcagtgactgggtctcagctcactgcaacctccgcctcctgggttcaagtgattctcatgcctcagcctcccatgtagctaggattacaggcatgtgccacacacccagctaatttttgtaattttagtagagacggggtttcactatgttggccaggctggtctcaaactcctgacctcagatgatccatctgccttggactacacattttaaaataagcagatgatttatcctcagtgactcaatgaataagtaaatacttaaatattcagcaagaatttacagaatctctattttatatgagccccaagctgaaccaattgcggaaggatagaaaagtcttcttgacaagttttcctgggcactgtggtgtttcttaatttgctgctgttgtttctgctatttctaattggttttgttatctccattctttgtgttgtatttccctgaggtgtggagaagttaaggccagagttaacgtttatagcattaattcaaaccccagaagacaagagattgataagagaagaaaggaaaggtagaaaaaagattatctacaagccagtccctcctgctactctttaactgaaaccatgaagaatgaacccaagcttaatacatttgtatgccctgtgttgtgtatttgtgtgcatgatgttgtgggttattgtatgcatcactgttcctttgagaacttagtggaattccattaggttccaatttatcccatcaaacaatgtcataaatcaggaacaatttaccttcctgatctaactgggaaggactttactcagattaaaaagagttaaagttccaagggaatcactaactctcctttgttgggaaaagtgctcctaatttgacgtttcctcacattccagccatacctcatggtggaggaactaggagatttccgggtccatggtgtatgatttaatgatttgtgaaaggcaagaatgttaacttagttgattactcaaaactgactgataaggtatcagacaggttaatttgctacttttctaacctctcccagagaacttgaaccaaagcctccttctccctaggtcatctttattgccctccgcatggaaggctaagaatttttgaaggaaacaagcattttattcctgtgctttcatttgctccatcattttattccaaagagacagcctttatttgtgataacctcattatttcctcaacaaccagtggtgatgtcacagttgaaatattttgatctcagatggaaaaagaaccctggcagatagggcctgtttacactgagaaacagagcttagtgctgagggtaaagagcaaggcattctccttttaattcaaacactaacagttatcagagtgttatctgggagacaagctcctggggattctgtgatctaaaagagtggcttttgactcgtaccttgttccttacagccattgcctccatggaatcctacaaccccatttctagaagggacccaaagagcatcagtcttttcctttgcctgcagaggtttaggagatctctgtttaccttggtctgggaagcttgttttatatgtattcttgagaaggtgcttattctctgaaatgagccaataaagaaattgttgttttatatgcatttattacaggaaataaggctaaagtcaaaagttttaaaagtgaattataggccgggcacagtagctcatgcctgtagtcccagcactttgggaggccaaggcgggtgaatcacctgaggtcaggagtttgacaccaacctggccaacacggtaaaaccctgtctctactaaaaatacaaaaagttagccaggcatggttgtgggagcctgtaatcccagctacttgggaggctgaggcaggagaatcgcttgaacctggcaggcagaggttgcagtgagccgagatcgcaccactgcactccagcctgggcaataagagagaaactctgtctcaaaaaaaaaaaaaaaaaaaaagtgaatgataaattgaaatggtctcaattgcatccttgagtacttggcatttaacaaaccaaaggatattttttaatgataaaataaccctgtgagaggacataaaaattccacgatatgattctatcatgtattagagacttaaaaaaaacactactaacaataacatataagattacatttacagaattgtatacagaagatatactaataatatagacccccaatatatgtctaaacaattcaagatgatctaaacttcttttctgttcagattttattattttaagaaacacatgcatatgcatgtttagactgttagttatgcatatattttttgaatttaattgggtgagatatttgtgacaagtgaatgcaggcttcaaatgtgggttgagtgggaaataaaattcagatttaaggatgatcatctaaagctattatgtcattaacattatagcaggcacagcaatacgttaacatcatagacctgggaaagctggacagagttgggagattgtgatggtcctaaaaaaggccctgataatcatttagcatgaaattatatagccttcagtaaaaactttattataattctgtgcattaaacaaatatccaattaactgacaataagaaaaatgagaatcgtcaggtaaacccttgatcaaatctttttcacctgattttctactaaatccagagtctcaaagcagtctatgtagagagcaccctctgtgaatgtatggataaaatgcatcctcccctggtcgccaggtaaaggagctactaattctccttgcctcagggtcacacatgctaggcctcaaatccccttggctttctaatcagccttggttctggattttcattcgttccttgttgaaggtgaacatgcagaatttattctacacaatgtcgctagtgacaaacgaagaaaagaaagggccagctagaacttaacagttccaactatctcaaccttcattctactgaaaaccacagaatgcctcacttctgtagagtcctctttatctaaggcaaacagtgctaagtagcacttcattacttaacgattattaagaaatgaattctctcaacccttaggcttctttgaaataactattatgtgtcgtagactcaatggacaaatatagaaccaaatgccacccttttaacagtgctctgagactggccggggaagagggtgcttatgttgaagaagcccaggaaaagctctgcatgtgaccaggaaggagagaggccagggactaggaaagagcaggcaggggccaaaagggaagtcaaatgtggtgcactgggcatgcatctttcagccagcctggcgaaggttcaaaatgagctctgtaacctcctgggtatgtgacctgtggtgtgtacttaacctttctgatcctcggctcctcgcctctaaaattatgataataagattgccttcacagtgctgtcgtaaggattcaatggcatcatgtacgtgaatcatttagcacggtgccttagataaactcagtaaacagatagtgttatgtcaaaaattgtattacctatgttgttattattgttattaaagtatgcttcaaaagttggccctgtgataaaatacaaatagaccccaaaagaggtctgtgaaataaagccatttggaactaaggtggcatgtaagataatatatttaagagtgatttctatttattaattcattcatttcaccaatatttatttctcaaccacattattccagccactgttccaatcttttttttttttttttttggagacagggtctcactctgtcacctatactggagtgcagtggcacgatcttggctcaccacaacctccacctcccaggctcaaacaattctcctgcctcagcctcctgagtagctgggattacaggcataaaccactaccactcagctaatttttgtattcttaatagagacggaggtttcaccatgttggccaggctggtctcgaactcctgacgtcaaatgatccacctgtctctgcttcccaaagtgctgggattacaggcgtcagccaccatgcccagccagttccagtcatttcagagggaaaaacaaataagccaatagtctttgccttcaaaaagcacctagtccacaagggagacagacacatagatatataatacgataaaatataggaaataaattaagcgtactatggtaaccttaagacatggatggtaacctggaagcaagcagactagaactgtgggagacacggaagcctgcttgggggaggcatcaaatttgactttcgtaagatgaatagacatttgccagactgtacagcaaagacagaatgtttcatttagagacggcctcagcaaaattatcaaggcatgaaacagcatcatgtgtgaacagcacagaaaccacgtgaatgtgtgaggcaggttgattgtgggagatgaggctggagaattacggaggagaagaattacatatagcatgttgcaggtgtgggaaaagggggtcagaggaaaacggaggctagagatgaagaagctgttggaactagttgaactgagcctggaagaaatgggatgagatgagaggtgatcaggagcaggtgattaggtctggtcttagcaaaaggaagggcacctcatcatctgagaaggtagagaaagaggcgagtaaagacgggtgtagatgaagacaaggttatagatagcagaagacagaaggttcacctaggaagcctctaatttttgtgtacttagaagcatggttatttactgagatgaggggcgtagcatggactgatttggaggtttgaggagagggtgaaagttcagaagagtagctcaaggatctgagcatctatgaatgaatacgtcgtagagttgtacacgggcccagcggaggttaagacaacacattcgtggtggcacaactgggtaatttttctctagccatgttcagtttcccaggtgtaggaaaaataagggcaggtgacggggttgctccagatgcagtgagaataaaaaagaaagaaagaaagaaagagaaagaaagaaagagagagagagaggaaaagaaagaaagaaactaactcaagaaaattgagtgtgcttctaagaaaagagttgagatggccatatagaagacccagagaagacacaaaggcaagaggtcaagagacagtggtgacatcaaggatgacggcattgaaagaacaagcacgccatagggagggaggaagagacttgaaaggacaggaggtcacggagtaggatatcagtgttgaagttctctgatacacagcagttctggctggtggccaagtctggggtgtggctcttgaagtggtaactgcagtggaatgaaggtaaagttcatttttattttaaaaaataaaaaattgtgagggcaggtgttgaagaggcaggctgtagagttgctgtggactgatcacaagaggtggatgggggatgatggttatgattcaagtgccagcctccaccgaatgactcagatggacaaaatcacaatgccagtgacaaaggcagagaggtggtgccataggctttaacttcgaagaggaatgagcttttttgcccaagggtgaaaaagtagttctggagccatgaaactgctcttcatcatggtgacatagcacagagaatctcaggcaatgggacataagattggcgagtttagatagagaagggagagaagaggaggaccggccagagaggacagtagacagtgtggagaaggtaacagatgggggtgcggagagttctctaacacctggccacagtaggtgtggtcccaatactagaagcataggcatggcatggcggcttgttagaatgtagcacccacccagacctactgactcaaaagcagcattttagcaagatcccctggtaatgtgtgtgccaatttaaattctagaaacactcctctaaaaataggtagggtgattacggatgggtaagggaagagtaaatacaaattctttccattgatcccagctctctctgaccatgctcatatgagaaactcagcttctccaaggaataatagaagggtactctatttctctcaggatgtcaaagcaccttagaaacatccgttttaattctttgcaggcttaatgaactgttttctgtctcacattcatttatgccaggtgagagggtgtcagcaatcaaaaccttgacttcagagagaggcagaaaaggacagagagagagagagagagagagagaatgagaacaacaaaaagaaactgcctaagggcacattgcttttacacaaggagttggtggaagagccaggagacagagccagggcccaaccttctgcaccactatgtgttctgagcatgggaccacacttcctcttcagccggtccctcatggccaaaaagctgagaggaaacgatgccagggaaccggtaattgtatagcttttccagcatactgctccagttccacataacggggcatgtcaaaacctactctcccatctgaacactcagcagtgaccaaatgggctggaggaagtgagagaaataccatgaaaatcctgggctgcacctcagagactaataaataattactaatgggaaagaaaacagaggaaagagaaagagcaaaggagcaggcaggacaggcggaatggattctggcccatgagaggggaacagatgcaaacaaaaaaatttaacacaccaggagcagtgacccaaagacagcaaaagaaagagagtcaagctggctggggagactcgctgttctcacatttgatacgtctgctcacaacatgtttcagtgacttattgaagctcagaattgggctgttaaatcattcagcatatgagatttgtcctgagttaaatggattacttccctttgtaggtttttggatagtggcttattttaaaggggagaactagagggtctctgctgaaatattgatgtgagggagattttaacccaggcatcagaaatgaccgaatggagacacaggggcaggtggcatattgtaatttgtctgcctcttaaattatgtagtgtatgtatcacaatatattgaatttaaaacctgaagtatgacattcagtaaataatttacaccggctctttcattaagtgtgagctgaggcttaggctaatgaaacctgattttagttagtgcctcatttaaatacagatgcagaaaaggaaatttctttagtgccactaagacaaggcatgcttgctgtgtagaaaacttgaactgaatctttctctctctccctctctgtctcacacacacacacacacacacacacacacacacacacacaccttccccaggagtagcccaggataaaaatgaataatacattaatttttaaaacatgaagttcattcaggcttctcctgcctaacaatttctttaaaatatataactaaaaagaggattgtttcacttggtatataccattttttttctcacagaagattctgatcctgagaaatatgcctgggattttggggatgactgtgacccattcagtaaacatctataaagcaactcctctaagttgttctctaggttctacagggaacccacagggagataagtttctgttcgtgatctagctgagggagactattcatgcaggtttgcaaattgaaataaccatgcaaagcaaccatgcctacaatgttacaaccaatgtacatcttggcttgcagaaactggtcccaccaagatatgttccatgttttgcagaaaggatgaaacttgggactgatatggccaccaatatctgagcttgaaaacttcggtggaagttaatgtctctttgcactccttcatgtgtttgttatcacagtgctacttttaatatctttctttgtgagctaagtagccatcacgttagcatactgcttttaaaatgttgtaaaacctttagagaatatattcaaaaggaatgattcctccctctccctcattctttccatatcatgtctgagataataaagacataaacaaagtcaactggaacaccttccaaaaaggttgaatgggaaaaagatggctacttgtctgtaaagccccaaggtaagctatttttaagttggtgcacccaaaaccatgatttttcaccttgatcttgactaatgtaattaatttaatatgcatttgtaatagaaagaatataaaatatgtacagagttctttagtcttaaaatgagacatgaatctcttaggtcagtagccactgggcatgagcctgtgccaggtgaggtgtcaactgtatacaacggtaggggttgagagacaggaaagaccccttctggctggagtaattaaggaaagtttatggaggaaaaggtatcttgtatgagtcttgaaataagggtaggattctgttagtcaggcattgagagtggaaggcaacatacacaaaaatataaaaccgtgaaaagacaagcgataactgggaacataaagctagaagatgttgcatagggcactgcaggaagaacaagactagaaaagtaggtggaaactgattttctgagacctgaagccagactgaggaggtgaagggtgagtagtggagtccttgggaaagtgtgaagtagagaaggacataattaaaatgtcactttcaggagattgcttcaatgtggagtgcagaatttgttggagtagggagggacagtgattaggggagtctgttaggaggcttctgccatgcagttcaggtatctcttagataaaagtacatgaattaatgtggtaataacggaggcttgccatttccagcttctcgcctctaagtcaattctcaacctactgttatttgacttcctctgctgaacacattctggacagaacttattatttccctctcaaatctgctccttctcttatattccatatctcactcatgacaccaccaatgtcagccgaaccaaataatttcaagtcaatcctggctcctttctctgctgaacccttcttcatccaaatgacctctagtcttccttatctaaccatatacacatttcttaaatcagcccctcgtgacaaaccatgctatctctatttagctcatcctaccattgtacaatcacattatcctagtgtgatcacagtgatcagatctctctcatccagccatggtaaaatagcgtagtggttcaacatttgaatttcaacccaaacttcctgggttcaaagccatatactcacacctttagctctatggccacggacagatttagctctttttgcttccatttctttatctgtaagatggtaaatcagagtaggctgttaggagttacatgagctaatatttgcctagcacttagaatgacatctggcatgtcataggtgctatataatgttttctattttaattaaaatagaaaataatccacccttccactaatgcatgatgttaaccatgcctctcttccttaactctgtaggctggaatctaagctgggtaacaaaacgtagaaacttttccatggtctgacccctgcttcatcctcccatctcatctcctaccctcgcctcacagtttgtgtttagataatattgtgtcacatgaagttctccaagtccaccacactcaaccatgccttcctggttctcctccgaagagtctgcctgcttgccttgtccccatccccctctcctcagtactgcttactcattcctgaaatgccagctcaggcatcaggcatcatttccccccaggcagccttccgtgaacgtgcaggccgggttaagtgcctcctctctccacctacaagataattttatcacggcacgaatagtatagtgctgaaatcatctttatgatcctgctcccagatctgactgaaaacttcttgagggcaggagctgtgtcatattcacctctaaaccccacagagacaagagccatgctagacatatagtaggttttcataagcatttattgaagtaaagaaaataattcaacagggttggcaattaactaaatgtggaagtagcaagacagagggagattggaagctgattccaaagtttgaagtccaagttaactcaaagatcaaggtcatatttatagaaacagggaagtcagaaggaggaacttttttgaaaggaaaggaaaaaaaaaaccctaatgagttaatttttaaacaaactgagttggagatgccaacaaaatatgcagttagaaaatagaccctgtggtactagaaaaaggccgtggtaggtttgagggtcattgaatttgtcatagtttagtagattatgctgcctaacaaacagcccccaaatctcagtgggttataattgcaaaagcctattgctgctcacacagcatgtctcctgtgagtcagttgcagctctgcctggggctttgttaactctgttcaggtttacgtgtgcatctggtgcgtactgttctcatagtgaaaggtcagaataagaagggacacggagccaaccacacaagcacatttaaagtcttgctcagaagtgacatacataatttccactcatatcccattggccaaagcaagtcccatagccaagcctgaagtcagtggagtgaggaggcatggtaacgacaagggaataaaatattatgaacaaatatcgcactcagcacagtgaggacggagggaattgtgtgtgtagaccagatcatacacttaatttcccattgcgggggaaagagaaaccaaagaaggaagaaagaaaatagcataaaggtaatcagagaggtaaagaagagaactaaaactataagttataatgcaagttttaaaagacaggaatccgagagaagagaaggtaggttcattgtccaacactgccaatgtcaatgaaaacaagaacagcatgtgactatgaggaggaaaatggagccacttaagagaaaggattcattagctatcctgagcccatttctgcacagatttctggtctttcagatacttggctaatgtcgatttaaaataactttcgctggagattgtttagaataggttttcacagcaattcctacagcagctgagttgtgtggattagaaggtaagctaagagcacacaatacagaacttctaactctcatcaaatatcaggagaattgtcacaaggggcaagagacccctccaggctctgggcttgtctagagaggaagattactgacagtagctgcatgatcctagccaacagacttgctaagaggagaatcttttacaactgagaaagtaaaaaaatggagtggtagccttcatcaaaaatggagttgtcgccctcatgaaacaatcatctcaatgccgttggagttttcaagcagaatctagtccaccatacaacaaacatgcggaaaagtgcatgcactggacaaaaagaccaacagatatatctatacatctatctatctatctatctatctatctatctatctatctatctatctatctatctatctatcatcagacacacaagggaagaatgccatgtgatgacagaggcagagactgaggtgctgcagctgcaagccaagaaatgccaaaaattgccagcaaaggggcggcacaagaagctaggaaggggaggaagaaggtttttccctgatagatttcagagggagcaaagcccttccaacaccttgattacggacttctagctccaaaactataaaagaataaatttctgggccgggtgcggtggctcacgcctgtaatcccagcactttgggaggccgaggcgggcggatcacgaggtcaggagatcgagaccatcccggctaaaacggtgaaaccccgtctctactaaaaatacaaaaaattagccgggcgtggtggcgggcgcctgtagtcccagctacttgggaggctgaggcaggagaatggcgtgaacccgggaggcggagcttgcagtgagccgagatcccgccactgcactccagcctgggcgacagagcgagactccgtctcaaaaaaaaaaaaaaaaaaaagaaaaaagaataaatttctgatattttaagccacccagtttgtggttccttcttacagtggtcctaggaaactaatacacttaaatacattttgaaaagcaataaagtagcctttgaaatgtttgctgatgactattgtgagcaattttaattagtagtattctttttgttgaagttaaaaatctgtatcagtatgagagattgatcgaattccattctttatgaagatacaggaaaatgtgtgttcagttatggccacatttacctgccaatgacttgttgggaattaagaaacattcctctaagaatgctctttgtgaaacctacttttaagagttgctagtcttgtttgccttgtaaatcatatttgtattaacagtttaaaatgtagtttgtggtatatatttttggaaactcgaaggaaactcccctgagatgtttaggaattgtaactgctttaaggagagagagaatataaagattctcatttgattaaataaactacttccgcttattgtttgaaattcagcctcagtggaaactttatattccattatttgctttttcctgagaagttcttggcacattgtgaactggagggtacaacgcaaaggacattaggctttcagtctgggaatgctttagagacaggtgaccagtgcttcagaatgtctgcttggaagctatggtggaatgtttgtacaggtatataagagggcacagacaagcacaccaggatacagagagacatctggatgtgggagcaactcttatggccatttaatgcccaccatctttattttataggaaaataccagggatgtgcccaaggccactcatgccaagtatggactaggctaaattctactaaactcatcgagtgcttgctaagcacccactgtgtgcatctgttggccacagtcatttggaaattatgatatatccagagcatgtggttatataaatattgttcttacaaatctctaggtgagacaaccaagtacaaggcaggtactgctactcccccagtgtcacatagcacgtaaatggcagaagggagtccggaatccaagtctcctcctatcaacccagtaacttacacttatgttacaactggaaaaactgtgagcaccacagttcattttcacgtacggttacatacaagacacaacaatttgccctaattgtatcccctcactttcagaggagtaatcctcaacccaaactccagtctgctgaagatattctcatcaacagctttgttttattttaaaccaaggctttctttccactctgaaatgccaccagcaattataggaccagaaggaatatccatttcagttcaactgttgtcataaaatattaatcatctcggcaagtagccatttccaaactgcctgtattctgcatcgatattttctttagaaacataccaatacctgtgtatccatagagaatacaagagtttgcaaatattttgagagtttagaggctaatcactgctgagtcataaaaaaattctcttctttgttttgatgccaacagttgtgccattaaaataaaaaaactcattgctgctctatccttggtagcatggagactcatggatttcctttgaatttttcagctctactcaggagcccagttcaagggccaataagcccacctagttgaagtccctcatgagggtgccctgaagggagaatttggctggaaaaaggccaaggttagatagaaaaccttagaattaactaactaagacgtaatcaacaataataaaaataaaagttactggttttggacacgtaatatatgccaggaactttcaatacattattactctcacaaaccagggatgcttacaaattatggatgcttctcaacattttccagaaatcgatgctgtgagttttatgttactcaagtttgtccaagtagaaagtggcagacctgaagctgagagacaggagtgtacaacttaaagattccattctttctttctatgccatgttgttgctctcaaaatactacctctcacttatcgattactaatagaatagaaacttatctgcactatccttacagcactattctcatagccttcctgcttataaataggcatcatcatccttttgcaaacacagaagctgaagctgaagaagttccatttatgatagtaaaagagggtgctaacccacagagccaggtctctgggccacaaacccttccagccaggctgcctctcaatggatcaatggaagggaagctccatgcacttaggacagaaatgtcagtagctggagttcagctagtgacctaaaacgctgatcttctctttacaacccccagattccctctagaaatgcccactttccaccctcatttccttgagccccacgatggtgttgacacccccaagttggctctgttatcaaacaaattccctaaaagatcatggagaccaaggtcctgagaaatcattgcatcctgaatagcccattagttaattttaataaagtgctaagaattgttcttggcacatgaagacttgttataattattcatcatcagggtacagtggctcacgcctgtaatcccaacactttgggaggctgaggtgggcagatcacttgagttcaggagttcatgaccagcctggccaacatggtgaaaccccatctctactaaaatacaataactagccagacgtgacggtgcgtgcctgtaatcccagctaaattataaaaaattttaaaaaagaaaaattagtcatcatactatttataacaacatttctgcatagaattgcctactgccacatcaagtccacatgtttctttttctcctacctctttctttagaaatgctacctggtaagtgatcaaagatcaaagctaacactagcaataagagttattgtcataatatatcctctgatgcgctgccttgaggagaatctagcatcacttttttggtgtttctgtcaaaaattcataacttcagtctaatcatgagtaaaaaatatcagataaatccaaacagacattcttcgaaataactgagcagtactcgtcacaagtgaaaatatcatgaaagaaaaggaaagattaaaaaaactgtcacggattgggaaaaaaggtgacataacaactaaatgggatgtgggatcctagactagatcctgtaacataaagaggatgttcctggaaaaattagtacaattcacaaaaacatatgtagtttagttaacattgtactgtgaaattcaactaaagttgacctgaggatgccttcatactttgaggccttagcaaattgcaacctaacttggtacataaactaactgaaagcctaacttagttattattttgtaataaatagctttgtctcagccaatcacaggcttccagtgattattagtccatgttcaaataaggcaagcacagaacgggagtcaatcaaagctgtctctgtacctcacttctgttttctgttcataaagtctgcctccccatgttgtgaggagagctctctgaatgttttctggttctgagggctgcccaattcgagagttgttctctgctcaattaagttctgttaaacttaatttttctagtttttcttttaacaataccaatgttaatggccctgttttgatcactgtattatggtcatataaggagttaatatcagaggaagtggggtaaagggcatccaggaattcttgtactatttttgcaacttttctgtaaatctaaaattatttcaaagtaaaagactttttttttttttttttttttttttgtttgtttgtttgttggttcgttttgttttgttttttaagttttggttggtaagttgggagaaagcttgaaatcagactgaggaggtaaaaccagtcttgttgggttggaatcccagttcaaccactttgacctgtgtggcctcaaagaagttccccaaacctatctaagcttgggtttctcaattgtcaaatgtgaacaataatcgctatctcacaggtttgtcacaagtgtagacagtaacacacgtaaagtgtgtagcatagtgtttgacatacagtaagtgtgcaaactagaagctattgtcatctttaaccaatatatgtcatttttcctctgagatggttatatttttaaaaatcctcaatagggcattgactggtaacagttcattgtattgcctttctaggaatatttgcattttaataaaattagtttgatgccatgagagaattcagtagcagattgtattttctaaaggtgacatcaacaatatctcccatcgtacaatcttttcagaaactttccattcctccatcaaaggtagaatctatgtaccctcctctggtatatgcaagattttgtaaatgccttggccaatagagcatggtagaagtggtggcatgtgatttccaaggataggtctttaaaatgacatacattttagcctgttctcttgtgttgctcattcttgggacatagccaccatgctgtaataaaatctaagcggctctttaataaaaataaatagacaggcatggtggcacgcacctgtaatttcaactacttgagaggctgaaacaggaagatcacttgaattcaggagtttgaggctatgtgatcaaagtcactgatcatgcctctgcattgcagcagctcatggagaggtccatgtggcctctgaccatatccctagctgagctcccaggtgatagccagcacccactggccaaccatttgaatgaactgtcttgatagcaagcacatcatccagctcccagtcaagccactcaggtaacaccacacagagaagatacggccagccccactgcacccttctccacttacaaatttgtaagcaaaatatattattgttattttcacccattaagcttttgggtggtttattagacacatctttgtaacatatgatgacagaaaattctcatagagaagggagcaggaatagaaatgggatttttaaaaatgtggacagatttgagaattggagctaggaatgggcttgggtagacttgagaaatatttggtgggcttgaagtcggttcatcctttccacaatgcaagagaagtaaaaagtagttttgtccagcaggctagaaatgggaacaaagtgagaatatctagatggggccaatagagtagggcagggtcctggtgtggattctcagggaagatggtgtctagagtcaatatcaaagttagtccccagggctggcctaccgtagtagatgaagattggggtttgaggtgccaattgatcatgctactttttccatcttggtttaaatcagttgagaacagacccaacgagaattcaagtccagtatcagtgttttgacctccaaatgacggatttcctgtattttgcctttgagaaagacagggcttgcgtttaagggcaaaggggagctgcccactccttcacatcctcatctagaactcgcccgcaggaagacctgggtttgtggagcagacactgggcagaccatgggggtcactccctggctcacaccccaggaaggagcccccaaagttttaggcctatctctaagaggccagccccacctgacctgcaccaggagtgagaataaacacctgggagcagggacctgccagagacagggccaaaaacaaagagcccagtccacgtggagaactgactctgccccatctcaccatcaactattaatatgtcattcttcatcctgcagaggaggaattaggaaagagacaagagagaaaggagaagcttcctccccatactttctgagggggtgaagtgtcctaggtagagtctgagtcaaggctttgggtgacaagagcagtttcctaattaagtgcaggcatgtgtctatgcagcatagtggccctcaaagttcagtgagcatcagaaacaccagtgaggcttgctaaaataggttgctggactgcaccccatgagttgccaattcagtagatccaggtttagcctgataatttttttttttttaagtctgggtctccctctgtcacccaggctggaatgcagtggcatgatcatagcttactgtagcctcaaactgctgggcacaagcaatcctcccacctcagcctcacgagtagctgggaatacaggcatgaaccgttatgcacagccaattttatttgttattttttttgtaaagaagagggtctcactatgttgcctaggctagtctcgaacttctagtctcaaatgatcttcccttgtcggcctcccaaagtgctgggattacaggcgtgagccactgtgcctggttgaaaaattgcatttctaacaagtcctaggtgatgatgacactgctggtccagagccattgtacattttataattcagaagacatacacacagcttatcttgtttaattctcacatcattcgtcattgacaaatgagggaactgtggctgatgaggaatgagggtcttatctaagctcatacaacactaagcaaaagacctaggcttcaaatatgtcttatgatggcgacatgaagattcttttcactgaactatagctgtttcctggagtaaatgcaaaacatagagagaaacccaggcatcttatgggcatttaagaaacagaggtggttattttgtatgctcatcattaaaaaaattggattattgttaattttgcaattccttttgaaaaattccaaaatttcttgtaaatatcaagaaaaaaagaacaagaaaagcttgcatgtttgtttgttttatgtcaacgtagagcagcagaggtagaaagggttgagtgccctttaggaacaaccatggttgtactagcagccaccctattgcctagagactgggcgaaatctggcatcattagactaaggagttgctggctattgctgataattctttttcaaaaaatcattcatttctttagagatgaaaagccttagccaaaacaagtatatctacaacagtactatttcaaaaagtattagggaagatactttgaggatgatgagagctttatattacccttcctattgattcatttgacttgcacctgtgatgccaaactctccattagtttttcctaaccacttaattaactttttgaaaaaccaggaccaaagaccaaccattgagaaggactcgtgtaggtcatgatctgatgagggcaatttgctatgcctccttttttatgttgccaaaacgaggaccagaactcttgtggacatttccaaagattcacaccaatattatgatgtatccttatgtagttaccacaagtatttatatttccaagtagatcttgatgccttacttagcacaactgaacctattatcacaactgtttgtgacttcttggtgacctggactgtgaggcagctgctccggcctcatgaccccattttatgaaccaaagttagtagcatgcctagccagcaattcctcagttcttgtgatgtgtgtgtgcatttacgtgtgtatgtgtgtgtaaatgaaggtagaggattgaaaatacaaaagaaattttttaaaacaattgatactcttcactgaataataacatgcttataaaaagtgcacagattatttttattattattatttttttgagatggagttttgctcttgttgcccaggctggagtacaatggcacaatctcagctcaccacaacctccgcctcctgggttcaagcgattctcctgcctcagcctcccgaatagctgggattacaggtgtgcaccatcacgcccggctaattttgtatttttagtagagatggggtttcaccacattggccaggctagtttcgaacccctgacctcaggtgatctgcccgcctcggcctcccaaagtgctgggattatggacatgagccaccacacccagacaaaaagtgcacaaattattaaatgcagatgtagatgaattttcacaaactgaacacacttgagtaactagataaataaacagaacattaccagctccatggaagttcctattgtattcctttcttgtcactaccctgaccaagaataacccctatttctgacttctgacactatatatgaattttagacacatatacaaatgtatcatatagtatactcttttgtatctggcttcttttgctcaccataatgtttatgaaatatccatagtgttacgtgtatttgtataatgttgactctcactgctgtctagtgatctataagtttaccacaatttgttgattcattctactatcaatgattactcaagtaattttcagtttggagatataaatagcactgctataaatcttttagtacaggttcactgatgctcatatgtatgtgttcctattgcatataaacctgggagtgaaattgccaggtcacaggtttgcatatgttatgtttagtgcgtactgtcagttttgaaaaatagcgggctcaatttacattaccctacacacagcataagaattttctttgccctacgtccttccaacactaggtattgccagaggtttttatgtcagccattctggtgagggtatttggtaacttgttttggttttaattcacagatgttagatatttggatattgtctttgttgaagtgccagtgtaatccttttgcccatatttccatatctttcttagcttaaaatctccttctgtcttctctattttctttactccttggaggactattaactgctttccattaaaaaccccaaatatccaacagcatgtagacaaatacactgtggcatattcatacactagcacactatgcaacaataaaaaataaatgatctctgggtacccacagcatacataaaactcaaaaccatcatgacaagccaagtaggccaaatacaaaagaatacatgtaatattctacttgtatgacattctaaaacaggcagaaccaatgtagagtgacaacagatcagtggtttccgtgagtcaggaggcagagttgactgcaaaaaggcgcgagggaacattttaatgtgatggaaatgtcctgtcttgatttcagtagtggttacatgggtctatccatttattacaactccttgaactatatacttaaaatggataatttaattgtattaaattatacctcaataaagtttattttaaaagaaaccctttgggaggctgaggcggacagatcacctgaggtcgggagttcgagaccagcctgaccaacatggaaaaaccccgtctctactaaaaatacaaaattagctgggcgtggtggtgcatgcctgtaatcctagctactcgggaggctgaggcaggagaatcacttgaacccgggaggcagaagttgcagtgagccgaggtcgtgccattgcactctagcctgggcaacaagactgacactctgtctcaaaaaacacaaaaaacaaaacacaaaaccctttactgagccctaccatgtgtaacccataagatatggtgaaattagggcttttcataggccacagtgatcagtcaagatgcccgtagacccatgtgtactccacccaagaatcctatctttctagaaggaaaggccgagttgccaacacccgttgaaataactgtttttattgaagacatcacaaaaggctggttctggctaccttggccacctcataccccacaaatggttttgtttccgctcacttacggctgcctgccagtcacccagtaagcaagccagcacacttaacaagctggcccatcaccacatttaaaatatacaacgcaaacgcaggcatttccaaaccctgtgctggggaaagaaacctccccagtgagttttcccaacattttaccttttagaagccaaactgcagtcatttttccctttgactctcaagggaaatctgacagggaccacgtttcagaaaacttgtctcccatagagcaccagagctgcggtattttaatagcctctctcagcccctcccctgggaacatattattatgtgatcattagtgatgggcaaacctcactgggtttccaggtttgagtctgtgccaaaagttcagagttcttcttttcttgacaactcaaaatctcccctatttttcccttttatttattcatttgtttgtttatgtgtgctttgcttggtttcttcctatcttaccacactctccagccttttctccactttacacacagaagaaaggaaggagatggggcagaaagcatgagtttcttgctggtttctctccattgaggtgcactggatgaaacagaattgtaatcaggccccaattactggcacaaccagaaaagagtgactagacacctgctatacgcccaggaccacaattccgggggtgcccagtgagtttgtaggtgagtaaaggataaaggcttttcttagaagggttcccattccaactgggatgctgggacaaacaggccaatagatgtgttgacgaaggcatgcagacattgctccaccaatatactttaaggactaagcagtcaagtttacaggaagactgaatgcggtgcattaagaagttgtaaaacaaacgtgaacattcttcatttgtggcgacaattgctgtttctggaatacaagaataaggcattgaattcattatattgaaattcaaacactccaactgaagattcctgtctatattttcccctctagaaaatgggagcactaatatttattccatgagctatattgttggttatggagctaagtggagtactgaatttataagttagggattacattcaattcaaatccattgagccttggccacaaggctgacactcaggcctgtgtttgtaaactggacccactagccagggattcatagggtcatggggacagtggggacacatagtctcaagcccttcccatcttccattagaggaatcccagaatacaacgtgtcccatgaccttgtagaaggctgggaatgtccaggtcagaggcaacagctggcctaggagggctgccagaatttccgggacactgatgcattcagaataggagaaaagggaacattggagggggtgcctggcaggggggaaagggagaggaaagcagagggagctcagaactgataaattcagatttgtgtgtttcactcagcctgaaaacaccagtgaatcacttatgctaattcgtcttttctctttaacacattttctccagtttgtctgaaactatactgtgtctactatgaataatttcacacagttacaacacaaaatttgtttttctgcccaaaaagcagtcacttgttcttggaccagattctcccaatgtgtcctaaatcagggagatcatttctgccacggttaaggccttcccactgttttctgtgaggctgcacttcttaacatacctgttccttacagaaatttgctaacagactaagcagatttgtgtcctaatcatttttttgttttctttacagaacattttgattctcccttaacctttatcatattgattgctgttggtagacagtcttggggcagaaaaaaaaatgtgttcagaatactgtaatttatgagtattgtcattttatgattgcattgatttttattttaaaagtggtttgcaaactgaaaattgacagaaggtagaaatgcatagaatcgataatgatatcagaaatgcacaaaatatctaaaacaaggaaggtaactagatttcatctcaggtgccaaccccatcaattagtagtgactgctggcaatgttgttctaagacggaacctgaggccacttccagccttagcaggaaaaagggccaggagttgattagtaatgtctgccattgcggtgcctttatggtgagtggggaaggggatgggcaatggggtgtcagcacagacatgtatattctatttctggtcttggcaaatgttcattcaaacaactaatatgtcaaggaaattatgtgggaactgaccaaactgaatagagacctgagcgtttccttttgagtatgtggctggatcaaaacacatctcgaggtactgttaacccgacgattcctcatctatgtaatcatatttttatcctgacacataagtaaatgacttggagattggtcctagtttaagacgtaagcaataaaaacacacttaaaatttgcactggaaattgaaaatccctttcatgtatacacatgcaacatgctattcaccccctgctgccttctgcatctttctggtgccatattctttgtgcctcctagacagaagctgtggaactgatgctagaagaaagagagaaatttaaatgaagaaatgatgctgtcattatttttaatggttgatttgtttttcttgtttacctagaaaacaggtggagaatagaacaaagagatttttggcctgagccaggactgagaaaccaagtctagttagtgagtcaaaaaaagaaatgatatcccctctcttattatgcaaaatctcataaatgcatcacctgtatgaaaactccttggacaagtcttaaatcttttctttacttaaatgctaataaatttggttgctaaaatagagggtgtaggttacctttcaggctaaagcagggattatttgtttacataggatcaaaaataataatatggcatatataaatatttatagtaggtcctggaaaagtacagatgtatacaattgtgccaaagagaaaaacattttctttacagcattatattcatcagcccttgccacaataaagctgcataacaaatcaccccaaatcttaggggcttacaacaacaagcctttatgtttctcactcatgggtctgaagggcagctgggattattctgcttcagatggggagttgactagggttggctctaggcttgaggttgggttcaaatctgttccatgatcacatttcagggctcaaactgatgaggttcttgctacctgtgttatactcttcgtattgtgatcacaagagtggaaggggtgagtgaaacagccttttctgggactgtcccacagtcatttctacccacatttcactaattaaagttagtcacatggccaaccccaccatcaatgggtagaaaaattgagtttgcttctaggaaaacaaactgcaaagttacatggcaaaaggttcacaccttttgtgaaaataggaagtgccaaggaattgagaaaataaaccaacttaccaaaaatattaagaggctctatttaaaacattgaatagggaagtggtatcatgaggtaaataataataataatagtagttagtattaaaaatcaggctttggagccagggtaatctgactttgaatattggcatcattcctttctgaccatgtggcttcaacaacaggcagaccttgcaaatgctagaactggaaaagcattcatcagcaagactttgtggatatctatccctgtgctcttccacgaacaggaatcagttactctttgcttgtatgtttctccacttgggcagttcaggtttcttaaagatattatctaatcaacccagctaacgttgtgccagttggggcatataattttgcaacaggatgccactgtccagtctgtgaccaaggcatgtgcgtacttcaggttcaatcagctgtggtggtaagggccgagggggagtcatacgtaataagatttccttgacagacatggctggttgtctaccaaagcattatgctcttagaggaaagctgctgttaggctggggtgtcctttcctacatttcccggagcctcttgaaactaggttggatcatgtgactaagtttccccaatagaatggaagcagagattatatgtaccacttccaaacaaaggcatcaagaagctgatgccttttctactctctactttcccattcagtacttacatggtgagaactccaagaccccagaggagggcagagccacaacagggaaagaggttgggtaactgattgatcatgtggaaggcttcctatgaatgagacacaaacatttgaactcaacttttttttttaatatcagtcaataaagactgtccatttcacagggttggaacagagcaattgcccttaaaaagggctgatggcatagtagtcattgggattagggtgtggaatgaagcaaaacataaaaggctaatcagcagagcaaagacttcagctgcagaggtctgaacatgccccgctgggagggcctccctgatgccacactcagctgagaaggttgaattcaataggaagtcaactgtaactgccaaggagtgtggccttcataagggatgagctccaaatccacacggttgtccacatttccactgtcactcatcagggagagctttcacttaacacaaggatgtgaggatttcctttgtaaatcggttgttcctctggatatggtttctgaaatatctgtcttaaggtctaagctgctctctctttccatgagaagctctgctcacccaactcaaccagttttaaccaaattttaaaagccattgactctctagggaaggctgatttctctcttggcctccatctatagccagcactggcaccagctatacttacttaagctcactgatgaggaggaggagcagggagctgttctctcattaataaccataccttgaccccagtttcaagctcagggctttggggggtgatggtagcctgggccagaggacacggctaaaggaagtccatctttgtctgcagggtattccaaggccaaatagaagggaggaagaagaaagctcaatctctctttctctccctccctctgtctgtctctctcactcccttcctcctctctctcattttcctgacacaaatccagttatccaattgctgccttcctccagctggcgcgctacccaggcagttgaatttactccatgctccaacactttctctatgagctgtgctacaactgtttctgcttctctggttaaagacggttctgtcttcccttgcctggatctaagctgcttgcctctcattaacagagtccaacctcagcctgtgtgttgccaccacccactttcctagttccttccctttcctctgacagacacacctttatactgtagggctgacttccttttggaccccaagaatctgctagctagttgctcccagccatgggaataaaagcagagctcccttttggaactccatggtcatcgtcataaacaagaacctcccagacatcagtggtggaatgggggcctgttcagctcttggaaacaaaggctttattctgaatcttttcccgactgataaccagtctgtcattctaagtgggaagggtgggggtggcagggcattgaagagaggggaggagagtacagagcagaaagcttattaacctttccaagaggcttgtgattcaagcttgtggagcttaacattttttttctctcccaattattttaatgatgctgcagaaagtcctaacttctgtgctgagactgtgttgctgctacggtctgggctgatcacatggtaacattccgacccaggcttggtcaccccgtaagaaaaatcagcttgggaaaaccactcctccttctgcatgcatctcagtctctctctctcttaaggaaaaaaaaaagtctcctttttaagagctttgaagcttaagtcttagatgtgagctttgcttcagagtttattagttattattttatccccattcaccactccccttgaaaaagcttatgttcacccagaatggcaattatttgactgtaattcaaaccattttgtgtcatgtagatccaggcgcattgcttgatttcaataattaagggaaggtaccaaatatttttgtcgctaaaggaactttagtcacataagccagtttatcaatcatttttttctttattaatcttaatgtatccctcccttatctcattttgagcaagaaaattaagccaataacataaacttaaaagctaactactgtagtctgtactttgaacccagatacaaaagtaaacattccttcctattaggtttaagatcaagacgtattaatttaggaggttaactaatacttagcaggaggctgattgggggatggagatgtgggaggaagaaggcaggaggaaacagaggagaaagtgatttttcacttctgtgcatgcttgtgcaatcttatctgaaggcactgatacatttttagtaacccaccatgaacagcatcagagttgggataactggaaagatggagaaatctttctgcaaccccagcccccctttccatttaacaagagcaactagaccctgatgagattggagagaaatccattcttgcctggattgtcacctacacatatcttaaagttttaaccattcgtgtacatatcatctaccgatgggtaattgcacttattgtaagtacagcttggtgaattgtcagaaattgaacacccctgtgtaacaagcacagggaacatcaattgcatccctcgaaacccctctcatgcccacttctagtcattacctccccaagggtaattactgtactacacctgatattataaattaatctgcttttgaatatatcatctgttttaatgtggttttggccatataaatggaatcatagcatatatacttttgtgtctggcttctttcactcagtgtttgagaaagtcaccattgtttttgtgtgtagttgtaggtagttcattctctttgctattaatattccattatacaccaaaaaattgtatatccattctgctgttggtggacattagggcaacttccagttggactactatgaatagtgctgttatgaacattttggtacatatcttttggtaaacacgtgtacacatctttgctgggcttaattctaggaaagaaattgctggatttatggtatgcatgtgaattattttagtaaaacttgccagataattttccaaagtggccataaccaatgtatactcctgcaagcaatgtctgagagttccagttgctccacatccttgccagtacttcatattttcagtgtctatttttgctcttctggagggcacgtggtgacaattgcattgtaattttactttgcacacctcacacacattagttttcatttctctgctttagttaatttccaatcatcccctgacctaacaggagccaatctgaccatcaagtcatccctttacaaagactctatctttactgagattctcgtaacacctcctccacctacctacatggacttttcgttttgttgagctcttgttgagcttagatatggagccactccatttatactcaattagctgctgggtagtgtccatgggctacacgtttttcctgtgttgttctgtcttcccaactggagataggtttccttggctctgcagagtccagctctgcaggccctgttcacatacacaaacccactgggctaaattcagatgggcataggctatgcccctattggactggactttgtatttttcacccaatcattctgatgcccgatatctttagcctagatgcttgatattgattaaaaccactcaagaagttaagtagtgtgggaagtcaagtaatgcggaaaaaaataaaagcacagttcttacagttggagctggggttgaatttcatacttaccagtttggttctttctgatcttaagaagttactttttgatcctgagcttcaatttctacatatacagaaagaaaatagggttgtaatgaggattcgagaagataacagcaaagtgtctggcacattgtaggtgctgcaaaatttatttctttatgcccttcttctttgcagaggtcttagcctctcaggtttataagaggataaaactcaaaatgatttgtagatctttagtttggtttggcaatcaacaattcttccttgtcagcctctctgaaatcaagcagtacactaaatgaggtggtgacttttgaaataaatttaataacttcttcaaatatttttttgaaataaaattaaggagaatatcacttctgaagtttaattagggcccttaatggcaaaactttcttcaaggcaaagctagttaacagcttttatatcatttccatcttgctatctgcttggcccactatgacaaggagataccttaagtcctgctcatgcaagtggcatccttctctgctcttaagtatgcgattaagattcagacatctctgcttttaggagggtgtttggagaagtaaatgaggggagagatttgcataagaaatttcctgctcttccctggaggatgttggcagcctttttcaatgggcaggcaagctctggagtcacatactgactgccccttaaaatgacttaaggcttggaagggtggcctctatttttcttctttttaaacattgctgtgctgagccaatgtgggttggtgtatccaaaaccaatttggcaggtcattagtttgtttcctctgatagtgctacactgcaggcaggattacaaaacacattccagctggctggactttctgatatctcgaaatggttccatggcctttagttagatttagtggtcaagattctggtagatttccctttctctttccttttaatttacagccaatttcagtggaaccacaccataatacagatcaatgtattatatttatattttaaataccataggtcaaaccttgaagtagaaatcttggatattaattcttcatgcatattttttataaagtaattttcatatagatgcttgttctttgccctagtagaagaagaatgaatggaaatgtgagagtgagagacatgggaaatacatttaataacttttccaaggctctgtcatttaattttgtactaagagaaaggtgttattatcttcattttaagaaatgaaaaaaaaggctaaaagggatttcatatattattcaaggtgacatagctctgtgaagttggaattagattcttaggtttgtctagatctcttccttttctcctcttctcttccacatagaatccatgcaacagttctactctccccctccacctagaattcatgtaacctcaatacaaattattctgtattagagttagacattacctaaatggtctcaggtcctaccaagcacaggaattccctctatgaggtccatgacagctcatcaaacctctggttacctacaataatgattaactcattccttcacaggatgaccgatagccattttgcatgtcttttcctgttagacaaaattcgcttttttggtatttccatccaggggtgcacaagagcagattcacacctactgttaccaactctcaagccgattgtgcacaactcttcccaactccacacttagggatgccaatttggtggcttgaaatcagctatggtgggtgtgtttacatcacaggaattactaaaagctatagattagggcttctccctccacaagtactacccactctgttatactgagaaccacttgttaaacatttatcagcacatcattgctcccaccctttgggagtgattctgccctttggccttccacagaagaaatccaaatcttcttccgcagcagcccctcagaaatttcagaacagctctttgcccactctgtccttctatgatagcttcaaaaaaacccaagtttgagtttcaggttggtctcttagttgctgtcgaactgtgaacaaacaatttaatctctctaaactttaatttctctctatataaaatagagatggtaaaaacaatatattacctctggtgtggatgtgaaccttcaatgagacagtgggcataaaatatactgtctaacctacagaaagctctcaattaactttattattagaatgattattgctattgatcataacactgaaacacttagagttatccaggacttccagcaaacgcattatacttgtcagggtcttggcaggagcagagacttggttacaagggagttgtaacacaagggacttggttacagagagtttaatgcccagatcatgtgcaaaagagtgagaatagttgaatagttaaggaaactggtgaggtatgttgagacacccaggaactaccaacagcaagaaactgtgacctccccaaggtctaaaggcacaaggaaaaggagcaataatgccaagaatgacagccccatgggagttggagcatagataagggatcataatgactctcacacatgagacccagcaggaagagaagagggggagccatactgtgacctctctatctctttctacctgccctcaaatctcttggcagtacccctagcagccagaagccagaagccagaggctacaaggtccgggatagcatcgttccatctgtagatatcgcctcatgggacacaaaacaggatagtgcaaagagagaggactggggagaaggaagtacgaatggagaacaatcaacatttgaattttcaatctttcattcaatccattgaatccacttttggcatctttttcttgtagaagctccagactaagaaaccacgcaaaaatttaacttgaatttaaattccaggaaatgggtttggtccttgagattaattattctttagattttctatgatgtatttacaaaatcctagacctgggatttgcagagcgcctattatcctgcactttgaggatcgcccataccccaggaagaaaggtcctgtgttaccgactgattcatgttgttccattcatcattcttatcaagtgcttgccttcattttatttcctttctctttgaaaccgtgcctcttagtaaatgtcattgctgttgtccattcatatgtgtgtttcatattttaagggtctttaattgtttgattctaacagcattcccctcccttttaagctactttggaagactatttaaaaaaatctacaggatctgaaatatattaaagacttcagagttttttttcagagaatacaatgttttcatcttttttttttaagaggcattttatagctcagggaaagtcacttaaaaaatctcattctactgagataccacatgccccatttgttcagaagtcttaactgacaggaactgctttaccactcacctgtgtctgtctaaacctcccagattctaagaggtcattgactcttttcataactcactgtttatgcaaagttctgtgtcattcacacagttaataaaggtggtgtcatttagcctttaaaagctatttccaaggatcatttcttacaataatgaaagagtcaaataaattccaatgacttgagcagatagattcttgagccagtcgaacttctatatttttgatgtccatattgacatggctgtctacagaacaaggacagaagtaatgacatcccccacaagtgctcatgtttataccacagattgatttctgtccaacccattttcattcacttttctattataaattagtctaactccggtaatgtacatgagttaagtaaaacaggtataagaaagcatactttggcacacatagatgctgtaggcctatatatgtttcttacatttaatagacatgttggtgcaagacatattttactgttctcttattctatattaagaaaaaaaatattgtgagtgtgacgacaaatggcaacagaggccggtatttgggggcatgggaaaccgggcagcacatatgccatctagagggatgcctgactgctttggtccagtgcactgatgctacatgggaaggaaggcctggctggtgttgtcaaatcttctcaccctcaaaaaacaaaacaaaacaaaaaaacaaaaacaaaaacaaaaaaaacaggaatattggcttttttatataaaaatttccaaattttagattttggcaacaattttgcaaaagttaaaaagcactttttaggccaaatctgatactttttaaagctgggtattactgactggccaagagttaggagctgctaaactcagtgagacccaaaggcaaggcatctgggcagtttgacatggagtaaggagagggaatgtttgctctgattgatttccttctacaataataaaaatacagaaattgtggaatgttctagaagccaccaagaaagtactcaactgctttcagggcagtcctgggtcctgatcaccttcttccctactcctcagagtcacctcttccccatgcacagacactcttacatacacatacaaaaacacacacacacacactggttacctaaggatgcctttccttgacgtccagtctgtgtttagacaacttagcttcctgcttgggcattatgctattagaacttgaaaatatttccataacgacattcctgtttcactaaatcctaatttatccatgactcaaagtcatttaaagtcatttagccatgtgaaacctctggctcctgggatctgtatgtatacccaggtgcctctttgctagttgtataaagttgattgctgatttgtaagcactcacctggatctcactgagaacaacatcacgtctcttaaacactagggaaaatcttagggttgtgcaattcctaggattggcctggtaagaaaatccatctaaatgattgtttatcattgtgtggataaaggctcctcaaacaagggatcagcatagagaattaagtatgccagaacagcggttcccaatctttttggcaccagggactggtttcatggaagacaatttctccgtggacttggggcagggggatggttttgagatgaaactgttccacctcagatcaccaggcattagcttctcataaggagcacgcaaactagatcccttgcacgcacagttcacaataggattctagctcctatgagaatctaatactgttgctgatctgacagaggcggagctcagggggtgaagctcccttgcccactgctcaccttctgctgtgtggcccagttcctaacagaccgcagaccagtaccagtggcattaggtacaggactgtggtgggtgttggggaccagtgtgacagaagatatccttcagtactttaaggcatttcagagcagcctagtggctcctgctcctaaaagggatacttcacagtgttgtggtatctgaacgccttaaggaaacaagacaattctgaagttaggcccagagcaagggaagagggagcccttccagaggcaatcctgaggttagctccctctagcccagccaacctctagcttatgacctcatcaccatcctctacttcctctttctttgcctctgcactgtttgactggggttgccataattctgacatggcctgctggctggattaagatcttctggctttctgagatggtctgcatcctgtttgctacatctgtatccctaagctcctcatgtcaatgtttccaaccaaaatgtattaactttgaacccttggctcctgcactctactttgctaaaaggatgctggccttccttgactttgcatggagccaatttccctccccctccaagagcatctacctcatggaaggatatacaagttccttcctctgacaacaacccctcttgccaggtgctgtgccttggaaacacagtcatatttaagaatggacattgccccatcatttgcactaacttaagctgactgactacttgtgcacaggacataccagagtcagagcactggaattattattttatgtcttttcttctagcttaaaaaagatatttttaaaaactggtttcataatggacagaaagtattacgttattgacctgaaaattaaaaaaagcaaatgcttattaaggcatgttggtcactatgtgttagaggacaggaattcctggtgatgcaatcggcttcatccagcaactgagtacagaaaaccttttcatatgtgctaagctgcaatgaagcctccgtgcaaacagtcagctctgactgtggatcccagcttctctgctgaggttcagatccctcaggacagcatttcctgatggagtcagtcactcaattctgtatccaggcactcacattgatgacacgcaagcaaataaaatggtttatgaggaaagattgctaccgagtcttggtagtcctgagggtcaataaaaatgttacttgaggaaaagaatcatcagcgtaaagattaattatctgttaaatcatggtggtgagagtagctttttctattgggtgatgaatttttatgcgtgttctgacatgcatgagtttgacatattacacaattggtacgacaaaaacagagaatgcacagtgaggagcccatatgaggtgactgtaagaggatctgactgcatctgagaggcaatgcactctcttgagcaactcaactccgatgtccactaaatggaattactcctaagtgtatcacaaccatggcccagttatttaataagaaaatcatacttaatatgaatgtttaacatcttcaatataggcaaatgttttgtttataaaagtcaggtcaataaaacaacactactcctttctattttttatcataaataataaagaattgcttgtggagtatctaaggtacagtcaggaaaactgaaattactctaggtgtatcaaacagaaggaatttaatagagggacttgacagaaatatggaggagcaaggaacccatagaagggatggtgaggcaacccacatgttaatgacagcaattaacctctaaggttagcaggagtaaatggtgttaccagggccagaatttggaagctacggccatggtgaggtcttctcagtggaagtttaaatcatagaggggacaatcattgccagggatgtaatctgaagcacagacagagggggagaattaccctggcttcttccatctcccccctccagccttccaacagagcctctgtttgcctaaatctacaagaaacccagggagaaaagcagcctgagaaatgcagtttccagagcaggatatgggaattattactaactggcaaatgactaggacactggtgtctcagaagacaagtatatttgtacatttgccctagataattaacctatctcttaagtgtactttgatgagtgaattttagctccatttttattattctgatttaaaatgaatgaaggagaatcacaatcaggctgtgatgtgtttgccaataatttgccctatgagatatctagttaggtctctctgtacccatatatcttcaattttccttaaatgttctttgctgtccacctccttccattttttattttagccttgggattatccactaaacaggaacgatgatttcattcatttttataacctaatccctcagagggtgagacaagctggaagatgagggagtacctgttggtaactattttagacaggtaaatttaaattttataagttcaaatatcttactcagtactaggacgtgagtagggaaatgtctggttcaatgatataaacacagcaaacattagcccagaatgtagtaggagaaatgcaaggaaaagaagtatttcagaagcatcctgctttttaaatgctagaattttctttggtctgaattgctgacgtccatcacagttttagcaacctttttacttgctgccatggggatctgttctctgcaatccaaaacgcagaatgacttgattctgaaacatattgagtgcaatctgcttctaaacctgcaaggcatatctaaaataatgtgcatgttttattgaactgatactgccacagtgtctattatttgcctacattattctaaggacttgataaatattatcacattttactttttcaagcaatggaaggtacagatatgaggacaggtcatgtgcactggtctatcatgtctcgtcattttgcaaatgaggaaactggaacacagagacattaagtaatagccctgcagttaaaaagttagcagttggtagagccaggatttgaacccaggggttctacttctagagtctgtgttcttaaccactatgctatgctattgtcttcgatatggcaacctcaggttagtcagacctattgcatgaaggctcacagctctactagtgagcattctagcaagcaaggtggaagctgcctggtcttgcatgatttggcctcagaagtcacctagtgtaacttgcactttaatctcttggtcaaagcagtgatgagcccactcaaaactaggagtgtgggaagagtgtcaaagcgtcaaagaatttgcagccatgcttgaatccatcacactgggcaaaataccagaaacaataaccacaatatacgatacccagaatggtgtgttggtttttatttgctgaaatgaccttatggtttcctatatttggtcctcatttatctacagcaggaaatggaaggaaatagagtctttcctttaggcagttctctgttccaactggtattcttctaacgcctcccttaactctgacaaccttctaaatggcatcagacaagacttccacggactcaagtttcattgatgtagttgtacccaaacagaaaatgttctgttgcctatattcaaaacacattgctaagccaattttctctaaattctcctgaatttcctcccctgggaggattttacaactgccaagtttgaatattaaacctttaggtacttttgagtaatactcagcagagagaaaagaaaaaaaaatattttaataaggtgacgttggagagagagagagagaaagtgtgtgtgtgtgtgtgtgtgtgtgtgtgtgattctcagagaaaaatgtaggtatttctgttttaacttaactgtaaactactgaactaatttagcttaatcttttgaatacaagttcaatttatgaggccagtgactatcaaaaaatttaagctgaaaaataatgggaaaaccactcaactcaccaaaattctgtttttcattaaaatctgagtttgtgacaaatgtggctttgtaaaaaatagctctggtgaatgctactattaatgtacttgatgacatttctttatgatgttttcccaagggagcaatttgattggtatagagaaaaatttcaaaagaaggtttccttctgtgtcatgatctaagacacgaatttcacgtgcagacaaacaaatattggagtgatcaggctggttggtctgtcgggtctttatagccaaggttaattctaattacatgactggctgcaaatttgccctttcctctcccaccaatgcagaagcagacaaaagatggctattggaacacaacagttcacagtaacattctctgccataacctctaaatgtgcagacaaaaatgttaaaggggctagcaattaaattatttttattaattaaggatgggccagcatgaaatcaaatcacccaattagttcagcaagaacttgaataaacccagtcatcaggaatatcctacatggaatatctgaatgatggacggagttgaaggagttgacttaattagaaagctttttcagccttcctagggcaacgaaacttcttttaaagtctacatgtgcaataaagtaagcttaatgtagcttggacttaagcttagacagcataagaaaagggttccaaccaccacttctgggaccggaccaccaagatgtgattcccatttctactccttggagctggatggctttggataaattctgtaacccccctgttccttttatctttcttctataaaataggaataataaacatgtctactttacagtattgtgaagaggaccaaatgaattaatttttgcttagagtaatcagcacagtatgtgcttaataaacgtggttatcatgtatgctataatcggctttggctattcttaacaattcatcaacataatttctctagctaccacacgtgagcagtcctacccccagtataatcatctggtggccttggggaagtcacttattgccagtgaactttgtgggattaaaaggctattctcgcatggtgacctctgcttttaaatcaaagtagctaaagcacatggaatgctgcctggtaaataaatagtagagacgcacagtctgaagcagaatggtggaataaaacatactaataaagtttttaaaataaaaatataagaaaaaagggagagagagaaaaaaataccactagggttcaaataaaggaaagggcccactactcaaatcaacatctttaaaaagaggcaaggttggagacattagaggctctggcgtcttccccaccacctcctaaatgcaccccttgcctctattctacccctgtaacggagattagagattgtgagtgaatgcctatcttctacgggaagaaatgtgcacttggagggtatgagggcaatctggtgactatatgaagtatcttcattataaatcctaacaaacggaagagagaagattcgaatatataatacaagaaaatgttacctgaatgaaagcaatttgaactagccaatttattgaatgtgttatataatgtgttctagaacaaatgaatacatgacagaaaacacagatatatcttacaaaaattgcaacttcaaagatcaagataattttcttaggaatacaagtagaaaaagaaaactgagtatgaggatgaaaattaaaactggccatggacttagctacggtaacatctatcaccagtggtaatatagcaatgtcttcaagttatttgggatggtggtgggtaggtaaggtaggggttcatgtaaaaattctaaactaagtcaagagagcacacttacttgatgccaactgaattatatgcaaacattcaaaagttatagcttttatgattaaattgcttaatatttttaaatcactttgtggcatatagaaagtgttatgtaactgttagttaattcattaaataagaaaaaaatgaatctcatgaagtccataagctcttcttaataaaatctaccttaacaagggaagccctgataagactataaatgtgtgtgctaaacctatttacatacagaattaaaattaaatcaatgtggggccaggcacagtggctcacacctgtaatcccagcactttgggaggctgatgcaggggatgcttgagcccaggagtttgagaccatcctgggcaacatggtgaaaccccgtctttacaaaaaatttaaaaaactagccaggcatggtgatgcatgcctgtagtcatagctacccaggaggctgaggagggaggatcacttgagcccaaggggttgaggctgcagtgagccgtaactctgccactgcattccagcctgaggacagagtgagaccttgtgtcaaaaataaaataaaatggtaaaataaactaaaaaataatcattgtaagaaatatgatttcagaatgtatacattctaatttgcaaaaatgcaaaaataataatagagcaacaggatatcaggaagtaagggggcagagctgggaagatgtgtcagtgtactcatttccccacttttgtatggagaatgagtagattatatctaaagtagacaaatcatgaaatagagcttcctcttatccatgtgttcaactagtgtttttgaagaccactatgtgccaggcactgttttaagtggtatggatgtaactatggtaattcttcatttaatatcattggtaggttcttagaaatggtgactttaagccaaatgaggtacagcaggttctgtaataacatggttccattcaaagtcattttattataattttatgagaaaaaaatgtttttcttatacctctcttcacttacggttgcagtttccaagaacctattgacatggtaagtaaggaaggactttctgtacaaacaagacatgcaagatccctgctccttcacactttatcctctagtagaaagagactagccaatgcaactagttaagataaaaagaaatggatggacaggtcaatgaaagactctcaaacataagtgggatactatatgacaaatgtcatttcaaactagtaataatagataattcaataaatgtgatgggaagctggcaaatgaaaataaatttcagatgagtcacggatttaaagatcagtgattaatccattaaaatagtgtgagaaagcattggtaaatgtataatcttggagaatgaaaataccttttaatttaaggcagacagcacagaaatcgcaaagctaaagatgagtacatttaattacatcaacatttgaattttctgtacaaaaaatatataataagatcataatacagtcaatagatggaaaaatatttataacacatttctgagacaggacacatttctttaatagataaaattcctgtaaaaataattttaaaaagtaggtgtgataatagtaatacaattttttttttgcttgctttttaagttaatgaggaaaaggcgaacaagccagaaaagtgggcaaagaatctggtaaaagcaaaccgaaatataatagctagtaagtagaaggtaagattttcagccccattcataataaaaagaaatgcaagttaaaataaggcagaattggccaggcacggaggctcactcctgtaatcccagcactttgggaggccgaggtgggtggatcacaaggtcaggagatcgagaccatcttggctaacacggtgaaaccccgtctctactaaaaattcaaaaaaattagccgaatgtggtggcgggcgcctgtagtcccagctgctcgggaggctgaggcaggagaatggcgtgaacccgggaggcggagcttgcagtgagccgagactgcgtcactgcactccagcctggcgacaaaaggagactccgtctcaaaaaaaaaaagaaaaaaaagaaggcagaattgttaccttaccgttttactaacatttgatggtgtccaaagctgatgtgaattccattgaggatagagtaaatcagcacatacttttgtgaaatgcgattcatgtacaatctttaaatttttttttaatgcacattttctgacccagaaaatctattgttagaaatgtcccctctgggtatattagtaaaattgtttataaatgtattaattaaaacattcttataagagcagaaagaaaaaaaaaactggaaatagctgaatgtccatcaggaggagaaattaaattatggcaataatactgcccttaaaaacaatgaagtggatctgtatgaatagatctccaagatttatttatttatttatttatttaagacagagtctctctctgtcacccaggctggagtgcagtggcacaatctcagctcactgcaacctccacctcctgggttcaagtgattccccagcctgagcctcccgagaaggtgagactacaggcacgtgccaccacacccggctaagtttttgtattttagtagagacggggtttcaccatgttggctaggatggtctcaatctcctgacctcgtgatccgcttgcctcggcctcccaaagtgctgggattacaggcatgagctaccacgcctggccaagatatatttatttaaaaaaaatcaaaaccctaggaagatgtggatattactgactgcgatgtcagacctttgtgcaaaggtttatacacaaatatacacacatgtacatctgtgcatttgccttgattctcctgtttaaatatgcatgttagccctgtttacctttagaaacaaagtcttttattagtatttattattttattttaattttatatattttggcattttaaaaaatttttgacatgtgtatatcattattttttaagttaacagaggtcatctgggtaagagaactatgagtcattatatttttctttctttacttttctcaattaaaaatactttggctaactatggttactcacgcctgtaatcccagcaatttgggaagctgaggcaggaggattgcttgagcccaggagttcaaggcttcagtcagctaggatcatgccactgcactccagcctgggcaaccaagtgagaccctgtcttaaaaaaaaaactttaaaatattatttaaaataaaatatgatgtcattattgtttaatttttaatagtttataaacttctcacgttaaaatgagagagaattccctaaaatattcagctcttttgtaaactaggagcaacatatttggtttactatgtgagacatgtcttgggggctaaagaagactagcatttgccatttgtcttgggggtggggtccagttgcattctcctcctttgctgatggcagcctggcccacatagtaagacagtggccttcttctcctagatctccttctccaactctgaacctgcttcttccaaagcaaggcctttcaaatttattaaaaacagaaatgtcagcaagtattttctcccattatataggttgccttttcattttgttgatcctttttcttctgagcagaagcttagtggtttgatgtagtcctacttgtttatttttgcttttgttgcctatgctatcaaaaaaattattgccaagaccaatgtcaatgagctttcccccctgtgttttcctctaggagtttcatggtttcagaccttacatttaagtcctaatcttatggtatatggtataagacaaggatccagttttattcttttgcctgtgtatgtttggtttcccaacaccatttattgatgataatttcctttccccattgtttattcttggtgcctttgtcaaagatcagttaactatatgtgtgtggatttatttctgtgctctttattctgtttcattggtctctgtgtctgtttttatgtcagtaccatattgttttgattaccatagctttgcaatatagtttgaagtaagagactgtgctgctcccagctgtgttcttttttctcaaaattgctttggctatccaggtcttctgttgttccatacaaatgtcaagattttttttctatttctttgaaaaatgacattggaattttgatagattacattgaatatgtacatggctttaggtagtatacactttttaacaatattaattcttctagtccataaacacaggatagctttacatttaatgttttcttcaatttatttcatcaatgttttatagtttaaagtgtacatatctttcacctccttggttaaatttcttgcagcatttttcacagcagccaagatatggaaacaaactaaacacccatccagggataagtgggtaaagaaattatggtacatataaacaatgaactattactcagcctttaaaaagaagaagatcaggtcatttgtgacaacatggatgaaactggaggatgttatgctaagtgaaataagctagacacataaagacatatactgtatgatctcacttatattgtggaacccaaaaaaattaaactcataaaaccagagagtagaatgatggttgccagggattgaggggttgaagaaggtaatgggaagatgttggtcaaagggtacaaactttaaaatacaagatgaacaagttttggggatctcatgcacagcaggaatggtgatgggtatgttaatatgacagtggtaatcactgtaaaatgtatatgtatatcaggtcatcatggtgtacaccttaaatatatttaaactttgtcaattaaatactaaatatataaaatataagtaaatattttttaaaacaagaaaaatcccagatatgcctggaggctttcctattagggtagacttggtggggagaccatagtgctcagaaaacagtgtggagcacagcaaggaaagtaactcagaatacaattctgaaagtgttcattaaagcacactcaatgtagaattaattaggtgttcattttatggttaatccacctcactcaagttatttcaaaaagagatagaaagacaactggagaaaagctgttcacattcagttccttttgtggcttaattgaagctagaagccaaatcatcaaaacaggggaatcgcccagttttgatttttaactactgattgatatggtttgactctgtgtccggacccaaattgtaaaccccacatgttgagggggagagctggtgggaggtgattggatcatggggacagtttcacccatgctgttcttgtgatagtgagtgagttctcacgatatctggttctttgataaatgtgtggcgcttccccccacaacctctcctgctgccttgtgaagaatgtgcttgcttctcctttgcgctccaccacgaccgtaagtttcctgaggcctccccatccatgcagaactgtgagtcaattaaacctcctttataaattacccagtctcaggtagttcttgaaagcagtgtgagaacagactaatacactgatgtaggacatgaaacaagagtcaattgatctaaaagttgcttcctatctaaaagtgcttcatttgtttattgctgaaaatgaaagaggacatgtaggaatgcaattcagacatctcctggtagctccataatgaaaatcacttaaaatatatgaccgaggtaaattttggcaaatacatctatacttaaaatagccaaatagttctagttctgtctgattctatgtttggcactttgggacactgtatttgctctctaactaaagtgaggtaaatccaaatttactctgaactagataagaacactcaaatgatcagagatcttttctccctataatgctttcatgagaaatgaacaaacaagtagatttgatttctctttttctctccctccctcactccctccttccctccctgtcttactccttccttccttgatttcttccttccttccttctttgcaacaaccactccatagtgtctcaaatggtagaacaaatataatacaatttctatatttttcctgattaacagctggtacaaagataatacttggccataaacatgtctctgaggttttcattatagaaagctaaccaaacttaaaattttcaaaaataaactaaattgtattcagggatattttattataattgtgtatgaggtacatataagtaaatcataaaatttaatttgcatttcacctttaagttgttgtgtatttcatcagcattcattcctcactatattaaagtaactaacttccctggagctccatcttttctgcctacttagtagtttacttgtgtaataagacattgaaacagtaagctgctgaatcaataccaagtaagcaaaaatcagctgcaagaaatgcagatctattgctaacattaatttttaaggcatttaatgaaattatagctgttttccctaatggtcttataacttattctactctggatcacaccaaatactgcctgttagccactttatacatgcaaattggtcttttattaatgaattgtttaaaccaaaaaaatggctccctaataacctaaaaatgattagcctcactttgtaaaaatacagcttacctatttgatatacacctactggcatgaatgatcttaagagactaattttcaggatataataataattgacaattgtgggaattgacaatttggattctggaaactaaatgagtatttttttttcaagaattttctcaatctctatgcatttataagtagaacatgttcctgcttctgtattttctatgctatcatttcaactcctttttcattccttatagaccattaagttccaccagatcttaccatttcaatctcttaacagccttctccttcaccccatgcttccgctgagtgcaagtactctctatctcttgcttaaacaattataacagccttttaatttatccttctgcctgtgatctggctgtattccaagccatcatgctcacttctactgaagagatttttctcaaaagcaaagtagagcctacaaggaaaagtccaaattcctttgcccagcaaaatattggcacccctttctcctcttctgtgctgtcatactgagctgctgatcatttctttaatgcatcttgatgtttcatgcttttctgcctttacccctgctgttccttctgcctggaattccctccccccaccttgtctatctgcccaacacctgctcagttttcatgatccaactcaagtgctatgtcctcccaggaaaccttttctgaccttcagctgtaggtggtaactctattcttggttcaatttctgtaccttgtataaacttctgtttggttgatttttatacatcgccatattcatctttgtagctccggaaacttagcagtgcttggaaaagtgaaagtcattgaatgaataaataaagcaagggcaggaggaaacaggtctccaaagccaacagttttatttcatttgtggcaaagtgccattcgatttaaattcaaagccattttgataggcactatctcagttcaacagaaactccagtgttcattttgggttcctccagaagctcactggatggcaagagttcaagtacaagtaagatagagggaggtgaaaacacaattaggggaatgggaagctgaggtagggaaggcaaggcagcctgtgaaggatgcattcttaagccagttatcattgtggctcactgagtcagttcagatcatgcacctcagaattacccctcctagaggcagatggggtattcatacgctaactcccattggtcattgattgagggttgctcctgggacatattaattctctagggcatctggccagcagcatgtgggcagaataaactgcaccaaatgggaaaagcccttagttggcaatcaggtatgcactgggatggtcagggctgagggggctgtggtagaccttgacatggcagctacatctggtctttgatgccattgagtggtcattgtaaatataacaggataaaatgtgatatttctcataatctctcagcttacatatacctcagactatttgctcagttcaatattaattagggaaaggagcagaacattttgttcctcattacattaagacaatttgtgaaatatgtccagggtgagaatatccactaaaaaacactgtcaaagtgattctcttgggttgctattgttcaatctgagtatgttgtaatcataattctaaagtcattatgctcaaaccctttttgcctttgccaaattatctcacctgaattaacaggtaaccaagatgaaaataatttacaatttacaattggtcccattaaggacctatagagagacgcacatgactgacagctcaaatataactatgccaggctgctaggctttgtgtggcccaacaagctgtgaaaggcacagaaatatgcaaatcagtagatgacgaatccctaggtattaattagaacttacaaatatattattctcctggaagattttgtcttgtaaagaggaaatgaccacacagaaattctccagcaaagccaatatataaactcttcgttgattttgttgaagttctctagagaacttcaactatttaaagaactatttagagacacttttcacctactgataatgccttctttttactttcttttttgacttgcatcacctcctctgctcttgaatgtattgcttacttattggagataaatataaatctggggaaatcactcataaagaagtaactccaacagttgtatcaataactgaagtttcatttgtcaactggttatttttttttctgtgatacaatcagatcttttctgaatcctgcacttaaaacattttaaaaacttgagggcactttgaattaaaccaccaattagttttacttttttaataaacatttctgatctcaagcagcttacaatcaaggaaaggacctaactattttatatgtacttagcctcctagtaactcctaattattcaaataaatgtttttgagaataaaaaagataaaatatttcaatgtaccagtaagttaaatcaaacttaaaagcatttataaaagtttactgagatgtatcactctgatagctactaccaattcatacaaagaaagtttaagaaattaagacaattacaaataaatgtgtcaggggaaaggaagctcaagaccactatgagatagataacaaatagtgttaaaagttgcatagacaaagtatggaatgggatttcagagaagagaaagagctgagatctggaaatgtcagggagggctttatggagtgaccacaggtcctgtgtgcctgggacagttcttgttgacccctgttattccagtgtattcacatcttcacatttcactcttaaaaaaacctatctgtttgtatgacagattattgggtctcttcattcacaaagcgaaatggaaagaaacaataggattgggactgctatggaaaatggtagtgaccccgagggtaataaagggcatgagtagaagtcaccagggtggatatgaacgtcatgtgcaggagacacaaagagcctgtacttgctgtattagaattcctcttgggagataaatgagatgaagatagctgggtatggaggagcaacattgtggggggggtattcctgaagatccagctcagacagaaacaagatcttattttcctattttcaagtcactagaaatgcacttgcccattcatgttattttctattagctttccattcaaagtcctacacatatacgataactggtgtcctggattggaagagaaaagaattttccaggtatctgtcatctccacagaaatgctttgtctttgcagtgcttaggttgccactcctgtcctctttgagagtgaactctgaagaagctgtgttcgggaaggggaacatcacacaccggggcctgtcgtggggtgggggcagcggggagggatagcattaggagatatacctaatgtaaatgatgagttaatgggtgcagcacaccaacatggcacatgtagacatatgtgacaaacctgcacgttgtgcacatgtaccctagaacttaaagtataataaaaaaaaaaaaaaaaaagaagaagttgtgttctgggttggaagtgatgaccttccaacagatcactgttaagttcaaatgaagaggaaccctccagcaaatggttacagataagactttaagtccgcctcattggcgaagagtcacctctgcatagctagctctgtcccaggatggagggccagaaaccaggaaagagaaaggctgggaggctcaggtgatttgctgggatgaaagttatcttgagaataagttaatatataggaaaagtctcaggcgtttccacatttgagcaaacatcttctaggcaataactgggcttctaccacaagggctgatttcaaagatctatttgaggatgaagactccttgctatcatattgaagaaattgagaacatttgccagatgagcccaaagggccatatagtgaggagttgatcaaatttattgttcaggtggaaacttgagttcttctaagtcaactcgttcctacaagtgtcagtcatgttcgttcaattttttaaagtctctcttttgaccctagcttccctcattatttgaatttttttaaacagccaaattacatataccccaaagttattccccactctgactcagcttcctttccttccactcccacatcaaccccactagccttgctccacttcattcttcttctatatctgcaatctagaaacctcaccaaggagctgcaaacttttcatctatttgttccacactcctcaccatcatttaagactgcagatgagcttcttcttctgagaactcctctcttatgaattctaagacaaatcaccattgtctgctttttatttttcggaacactttttctgtgacatcttccatgcacttccttggcaattttttcctcttcaaatggttaagccttagctcagaaatctacaactcaattccctaatccttctcctgatctccaggccagtgcctaattatcactccagaagaactctatgaggatatttaaccagaattttctaggtacttccagaaagaatcatccctgagtctcttgtcaggcttttgctcatactcccccatgttaagggctccactagtttttgtttttgtttttgtttttttcacctgggctccaaaccctacagatactgttggttctttccctctgcaaaactctcctacccatccacaaggcacaacctgcacatcccatctccattatagctttcactttggcttatttttcatatggacattagacccccgttaccacttctgtgcatagttacaaaagctaggaactggttctactacctacagtctctcactgtactttctacagtgcgctattactctctaccaaatgtgagatctgtttttgtaacttgcatctccaacatgccattcctttagtaaaaacatttcactttggagtaggaggcaagagtcctaagatcctgtagtctgccacttttcaaatcttatgaggttggatattgtttttgtacccagagatccacaacataaggagatctactctttttcttcctccgtgcctgagaggccgacttctataggctgcagagaccgagagtctgagcatttggtgtgcaagctctgaatactcccctcctcttgagtatgagaagtatctatgaatattatgaaatgttacccctcttattgggttatgttataaggtaacagtgaaggaatttttgcagatgtaattaagattcctaatcagttgacttcgagttaatcaaaagacaggttatcctgggtaggcttaatataattatgtgactttttaaaagtagtgtctagtagtcagaaagacagtctcctgctggctttgatgaaaagagcaaccaggaatgagttctacagctgcaaggaagtgaattctgccaacaaccaccagagcatggaagagaaccctgaggcttatatgaaactgcagcccctgtcaaaactgattacagacttagaagaccctgagaagagaactaagttctttctgcattcctgacccacaaaactccaaggtaataaaatgggcttcaagccacaaagtttatggtcatttattacacagcaataggtaactaatacacttgctcttctggtcaaattaggccaatgagagatgtccacagatgttcagagagtaagagaaaagaaaggttgagatatttatttgccccgccagctccccagcttctgtcaatggcttgccttcagctgtggctttctctgggctctagcaactatcccttctgcgttcctggtttgcctacccaatgtagggccacaatacatcatgatcccttaccactttctctcaattctgcccacagttttgtacaatgttcctttgttcaactcttttcaactgcccctttagaatatgccatcatttccctactggggctcagtctaaagaatagtcttaatttctagtatagtcttatccctatccaaccccacctccaaatttgaactacctctttgtactcctcaaaacaacatcctacatttttttcacatgatgtcttggctttgagttgttaccactgtatagaattgagagaccataagcatagtggggaaaaaagccccaaactcccaaaacatgagtctagtgtaagctatgccatttgctagccatgtggctttggaaaaatgacttaacctttccaagcacagtttcttcacctgtaaaataagggtagtgacattcactgagcaaggtttttgttccacatttcagaagtgagttgctcttcattaaacctgaagcaattgtttctcaactcccttaaagttcttatctcatatgccatatattttatatgtatttacccgtaaacatgttgcatttcttccattgaattctaagtaaattatgtgcagagattatgtacttttgtattaactggagcccaataacatagtgccgtgggctttgtagttgctcaataaatatttgtagactgtatgtaaaaggaaatactatagttgactcttcacagtctatttaacagaaagtcaaaacattttaatatcattgacaaggtatgcaaatgtattagtatatgataattaaataatatgtagtggatatttaaaacaatcgtacttggccaatttggcctggcttaggctttgcatataaattaccccactccactcatccttcctattatgtctaatcaaatgcaaaataggtaaacatttgaatgactaaatgctgctcttttgctgtggctcccggggttcccatgaaagaatttcatggaggtaaagtaatcagaaccggtattgggtgttgcactagtaacaaagtgttactcatgctaaaaagccaacaggcttctcaggggagtcttattttgaagactataatcattttccagaagcatgtgctcattcaacccatatttttgaaatctaccaagtgcaaaagaaaatcacataagataaactcacatctttcgagaaccagaaccgatggccttaatttgcatgtatatagtaatacaaatttgcaaccttttgttgtcttcacacatatcttctcatttattcttcacaacctccatgagaagtcaactgttagtctctatagagtattcatgagggagccgaggctatgagaatttgttactgccatagatcagaggtccccaacccccgggccatgaatagtacttgtccatggcctgttaggaacccccaggggcaggtgagggagcattactgcctgagctctgcctcctgtcagatcagcagcagcattagattctcataggagctcaaaccctactgtgaactgcatgtatgagggatctaggttgcatgctccttatgagaacctaactaatgcctgacgatctgacgtggaaccgtttcatcctgaaaccatcacccccaacctggtctgtagaaaaattttcctccacaaaactggtccctggtgccaaaatggttggggacctctgctttagattgactgacccaactggtggcctttctgatgaaatatccactgtttggcaatataataaaagctgggagaagagaaggagaaggaggagaaagaggaggagaagaaaggcatccaaagtcctatttcttaaaaccaggccatattgcagacagaaggccaaagaatacatttgaagatacatagagtgagtagcaatcagaaactaagttcacacatgttatccatttgaccttcatcatgtcagtctgaagcaagcaaacatatatttatttaccccaattaacagatgaaatgaccattttaaagtcagtcatccatgacagaaccaggaattagaacccaggtcacccaactacatcttagagtgttatcaacatagtttacagacataacttaaggtgtacatcttaaactgtgtgacagtctaatcaatgcacaaaattcattctttttaatttttaagaagatgtagttggtacttgctgaaagcagtgatcctgatttggccaacttggcctagtttctgatataaatcactccacctctcccatcctttctaccatgtctaatcaaacaccaaaaaggaaaacatttgattgactaaatgcttctcttttgccttggctccaagttcctgtaaaaaaaacttcatccaggtaaagtaagtagggatggttatgggtgtcacccttgtaacaaagcgatatgtatgctaaaaagcaaagagggtttctcagggcagttgccacaggtttccatggaatgacaattacaaggtagatggatcacgtaatgcctgctgtgaactttacaatacatggggatcactattttaatgttgatttgcataatgtttggcctagcaagaacaatactgaatgctaatagctacagaatgcaataaaatggaatatcatgtgagctgaagtgctaaaattgctaaagtatgactgtaagcagttaatttcatcccgagtcttgtccacacacaatcaaatgcaaatttccactatctcctgagaaactgccaagagatgactgaaatggaatagcaacaacctcctttatgtggaatcattatctggtcatctttgcttttttacataacttgtctgtaccctctgatgcatttgaatttgcaacttctactatccctatcttaaacaactccccactcccacctctgccccttccacatttgctggcagatgcactaagtctgataaactcagcaagactgaatctcaccctctgaactgaaaaactttgaatggacctttgaaaacggtagaattgacaatggttagctgcaagtgatattttcaaggcaaacagacactctcccaaagtattaaataacccagcattctaagttgcaggtggaaggtagccattagtgaagagagagaaaaaaaaaagaaatagctcgtctgtatttagatttatcatttctgactattgctcttccctggaaaacgggtaggtacagtcatcctgtacttcgatcccaaatcagtctctggagactacttatttatttatttatttatttatggacttctttctttcaagcgttcgaactcatttccaccacaagagggcagccatctctaaaaaaaaaaaaatagggccaaaatttatgtaagttgtgcttggaacaagcattcagtagttcctcagaaatcatacaccctacataaaagagattctgcaatgggcagcactaacatgaaacagtgttcagaagtacccattttccctcagattctaaactgacaaggtttccacttaccaggttatgaagttctaaagctgcaagacatccttgaggtcatcacaggatatttatttattttttcttcgggtgcatccaatagttatcaacttttcctcctctttaaaagctacttaaatctcattgaagttttgttttgttttgtttttgaaatctaagtaatgagagaaacaattgttaacttctcaattaaacttgataggaaaggaaataatttcagaagccctgtgtccatgagtaggatatgttttattgcctccttgtttgcggtgcaatgactctgagtgacaatcaacttctatagcaccttttttttttttttcaggaaataaagtagcatgttcctgaataattcccccacccccttttattttcctggtagtcaggcttcctccaaaataccttatttgacctttatacctttagaaacagcaagtgcctaattcgcctctgtgggttgctaatccgatttacgtgagcggaacctagtattattttagctcccctaccgaaaaaataatacacatggataatagttctattaccagctcctgcttctgacttttttctctctgtttcgcaggcccgatagctctgggaaagcagaacttggccttttccaaaaattttctgcccttggttttggggatcatttgggcaagcccgaggtgctgtgcatgggggctcctggaatcctgggaagggcagaaagccttggccccagactcatcgtgcagcagctctgagcagtatttcggctgaggagtgacttcagtgaatattcagctgaggagtgacttggccacgtgtcacagccctacttcttgggggcctggtggaagagggtggcgtagaaggttccaaggtcccaaactggaattgtcctgtatgcttggttcacacagtgcgttattttaccttcctctgagctgctaatcgcctgcctctgagctgggtgagataaatatcacaaggcacaaagtgattgtacaataaaaaaatcaaatccctcccatccatccttcagtctgccacacacgcagtctacgttacacacatgtcacgtaaagcaggatgacatccatgtcacatacatagacatattaaccgaaatgtggcccttcggttgcatatattctcatacatgaatatatttatagaaatatatgcacatatttttgtatattggatatatttatgtaactataaatttacatgcgtatggatatgaaaataaatgcatacacatttatgtaaaaaaatttgtacacatgcatttacatatgtaaatacatacatctctatgtattaatgtttaaaaacactcaatttccagcctgctgttttcttttaattttcctcctattccggggaaacagaagcgtggatcccacgtctatgctatgccaaaatacgctgtaattgaggtgttttgttttgttttgttttttgaaatcgtatattaccgaaaaacttcaaactgaaagttgaataacgggcccagcggggaaataagaggccagaccctgaccctgcatttgtcctggatttcgcctccagagtccccgcgagggtccggcgcgccagctgatctctcctttgagagcagggagtggaggcgcgagcgccccccttggcggccgcgcgcccccgccctccgccccaccccgccgcggctgcccgggcgcgccgtccacacccctgcgcgcagctcccgcccgctcggggatccccggcgagccgcgccgcgaagggggaggtgttcggccgcggccgggagggagccggcaggcggcgtcccctttaaaagccgcgagcgccgcgccacggcgccgccgccgccgtcgccgccgccggagtcctcgccccgccgcgctgcgcccggctcgcgctgcgctagtcgctccgcttcccacaccccgccggggactggcagccgccgccgcacatctgccgccacagcctccgccggctacccgaacgttctcggggccagcgccgagtggatcaccggggaccgcgaggcacccgcgcgccgcagaccccgcgcgggctggagcacccggcagagcgcgccacagcgccgtggcctctgctgcccgggctgcgccagagccgcggacgggcgcgcagagcgccggggactccggagccgatccctagcgccgcgatgcggagcacctactgcaggagatcgggggcctgggacgcgctggccgaggtgtgatcggaccccaggctagccacaaagggcacttggccccagggctaggagagcgaggggagagcacagccacccgcctcggcggcccgggactcggctcgactcgccggagaatgcgcccgaggacgacggggcgccagagccgcggtgctttcaactggcgagcgcgaatgggggtgcactggagtaaggcagagtgatgcgggggggcaactcgcctggcaccgagatcgccgccgtgcccttccctggacccggcgtcgcccaggatggctgccccgagccatgggccgcggcggagctagcgcggagcgcccgaccctcgacccccgagtcccggagccggccccgcgcggggccacgcgtccctcgggcgctggttcctaaggaggacgacagcaccagcttctcctttctcccttcccttccctgccccgcactcctccccctgctcgctgttgttgtgtgtcagcacttggctggggacttcttgaacttgcagggagaataacttgcgcaccccactttgcgccggtgcctttgccccagcggagcctgcttcgccatctccgagccccaccgcccctccactcctcggccttgcccgacactgagacgctgttcccagcgtgaaaagagagactgcgcggccggcacccgggagaaggaggaggcaaagaaaaggaacggacattcggtccttgcgccaggtcctttgaccagagtttttccatgtggacgctctttcaatggacgtgtccccgcgtgcttcttagacggactgcggtctcctaaaggtagaggacgcgggccagggcccggggtgggtggtgggtgggagggggatttgggcagccactgcggtagagcccttccttacgtccaggccagaagtaaacagacccctctccagtccacgtgcaacggagccctgcaggggctcccacttccagctgccccgggcgaccgtaagcctcaccctcccggcccgcactcttccacccctctttcttcccctctccctggaatacttttggagctgttaacacttagatgaggtgttttatttatttatttatttatttttaatttttttaaaaacttttttgggtcaaagaaatccctttgagagggtagcccctgggtttcacccgttagctgagaacctgtccgctctgccatggtgatctccattcttcaagtgtttccgggagacttggtttctttgctcagagccgtgtcccatttaggaaagtactaggagtttggggttctccctacttgtttccagaaatgcgaggggtcagtactgaaggatcacttggtactgtgtttttaacagctgacacgtgcattaatagatattcaccatttacgtaatcccgggaagatacatgtgtatcttgactgcactgtggggatgcgggatggagctgcctttcgagacacccctgagggtaggggcctgggacacaagtcataagtggcttcagaagttgtggccttgagcttacagggtctggaagctataagggtgtgtgtgtgtgtgtgtgtgtgtgtgtgtgtgtgtcaggaagttctatacagtgcctctaaggaagtcacatgcaccatttatgtgtgtttatatgccagacagcgctcagcactccgcatttgggtttgtataggggacgcagggtgtcagatcaagcggtggttttcccaggttcccggcattggctgtcagcgctgtgtcacacacaaaaaagtgacagtcattggcgctggtttggttgggggggagggcaaatcccaaatctgatgtcagacgagctaagcgttggatgggagcgataaatcatctggttcaggaacttgggacccttcattatcccaaacgtttgagcttcggtcggtcttacctagactcgtgagtgtgccaagccaggagggcatcctggaggaggcacgccagccaaatgggagaccgggccgcgggggcgcgaggggggaggactgggcggggaactcgggtgactcacgtcggtcctgtccgcaggtcgaccatggtggccgggacccgctgtcttctagcgttgctgcttccccaggtcctcctgggcggcgcggctggcctcgttccggagctgggccgcaggaagttcgcggcggcgtcgtcgggccgcccctcatcccagccctctgacgaggtcctgagcgagttcgagttgcggctgctcagcatgttcggcctgaaacagagacccacccccagcagggacgccgtggtgcccccctacatgctagacctgtatcgcaggcactcaggtcagccgggctcacccgccccagaccaccggttggagagggcagccagccgagccaacactgtgcgcagcttccaccatgaaggtgaggcatggagcagggcgtgggggcggggagtcaccctgcaaagccctccaccgtgggcagactgcagccgtccctgtagaggcagcttggccggggcaccagcggacgtttccactcttgcttctgtactatcgtttctgaatctgattttaactcactgcttgtgtggtgggggagccagggattcccctttagtaactccgcaccctcttcctggcttgcagccagaagagctactcctcctggaagaattggagagaaatcaagtgatggggaagatgagggcaaaaggcatgcctctagtcagctaaacgtgcaagaattccacagagggaaaaggagaaaaagggaggcagattgagatttctttaagtctgtttggaagcttttgctctataaatctgccgcttaagccagggttttagggtagacagagccaagggcagagttttcagagatagtattgaaaaatcaaagcccagggccccaaagtctttctaatttatagttgatctgggcctggtttggaagattttgaatcccaatctaatccccgtgggagatcaatactacaatcaatcttattgtttccacaatgactttcttgtcctgtgcttaaatctgagataggctctgagtagagacaaggcaagccttcagataaaagcgtttgtagcagctgcctgtttttttttcatgtgcaccgaaatgtggatttttttttcttttatgatactacatgtggtttttctaaggtgggatatttctgcttgtttcatcagaagggcatttagtggactggaaatgtcttacagcagctattgaggtctgctgtacctaagttcttagagcaattagtcaaaaatatgttccacttcaattctttttctacacttttaaatgcttctttggcttaatacatttaaaatagagcatgggtttcttcaattcctagaaaagagtacaaaagtgtatatcacagagcaaccacttggcagatatttggggagttgggagtgaagttctctttcttgcctttccctgcttaggtggtaaatttcaagtgggaaatttacactgataatagactaatgggaaatggcacttccagatgttttctcccagtgtgaagggtgacttatacttgtgagagtatttgttggtaatgggaataagtcccaaaggcaagccacatagcagaagatacgttctcattgaggcagctacacattacgacggggacactgaattgatcatcagttcatttacaagcacatttctaagtgaggtgctctctgctagcagaaatcagatttgaaaggcagtaagatctcactccactctttcagaattcatccaatgaaagcagaaatcacctgttgtcatatgtaaaatttgtgtgtatgtgtacattctgccatcttaaccctgaaatgattatagatccagctaatcattcccaggtaatgctgattagaatacttttttttttgtataggaatgtaataagaacaactgttttagacacctcttctggaaatttagcatggaagctctcaactttatttttaaggcctggaagatgctgtgtctctgttacaacttaaaaggaagatcatttaagttagttaacacctaaaacattccattgtgtgaggattttatcagtgatgtctgcatattctcatcattcatctagaagtggtttgatcagaactaaacaggctacacgttattcaactgtgttattttaacttaaaaagcatgcttgagtttataaaatcagaatttatatctttgtgagtgtaaatgttacctgagaaacagtacagaagtgaccaacttgattaaaatcaacttgtaataacttcaggtcttaatgcagttagataatggagaaaagctatgtaattttgccccaaatttcaactaatccatttcttgtctcattatgactaatatatcatccttaatctggatggatatagcacttttttcaagactaatcattgttgtatacacccaggatttgcttttgataaacatccttgtgccatgcatgccacgaaaaaagtttttggtaaaccatgtgatgaaggttgctggctcaagaacagaatttagtttctacagcattaatgagcatttatttgaaaaaagaccataaagacccaatcataagaattacctgttgggttttctttgtaggtgtgatcgaatggtttggtggaattactcgacgagatatcatgatagcattctttcaaccaatatgagtataatgcgaccatatcataggggatctgagacagaattatcagttgtatttttcctattgaattttgtctagtcctttctccagtggcttttatttgggagaatatcagctttgctaaaatgttattgttttcaagatcattaaaaagtgcttcagctacatagacctttggaaactgccattgaacatagaaaagtcagttctgcaagtggaaagagtgttttgtgtattgctgtagttggaaacacattgaaactggttgacttcactggccctccaaaaagtctttatgcttttttgtcagatgggagagagaaagaccaggtgcttcttgttctcctcactctgaaggacacagtcttctttctacatgaaataactggattatttgcctctgtgactgaagctttcaaatagagattaaccctctttccacaaatataattattatgaaaatatccatataatagaaaagttcaagaaataactattgccctgcattagagactttgtggcacaaattcccccgtgcaaacaacagatttggacacatagatccaccaaaaccaatacttacctggtatggttccctagtggccccaggtatttcattgtcattacagaggccacattaagtaggaaaattactctatttggaaatggttgttgagattgaggctttggtgtccagtgatacttccttggcactgacattttccgttccacctgttttttagtggttcccctaaatttctcttaatccctttgcagtgaactattttgcgttcttagacttgctctttgtgtattttcactgagacaataagagaatatttcatcattccgaaggtgttggtgttaagggtgggcagaggccaaatcagggttgttgatgacaaccatgctctctattcctttatttgccattcccttgttgtattttttttaaaatggaatgtttttaaccttttgtatttgatattttttttctccttgatcagttgtctgttattttattatctggaaaatcttatattatactcagcctctttcattttgtgttagggcagtgacttccagccttactgattgccagcatatccccaggttttgttgttgttgttgttgttttactggagattttttagcccaaagtgtgttttaaaatcctcgaagcataacggtaacttacttttttgataaaacttaccatactttatttagaacaaaagggcagccacaaaatagcagtggctccttataaaatagacacattccagtgggccccgtcacttttctgctcatttctgtctgttctgtccatcatacctaagtcatatatttctgttcatttagttgggacagaactcacccaatgttatcattgtactaaatataaatgtgcccctaatggttttgacttttgcttaagtttttgagtcctcatgtatgttaggtagtgccatctagtagccagaaatttgggaactggctgggcatgatggctaatacctgtaatcccagcactttgggaggcttaggtgggtggatcacttgaggtcaggagttccagaccagcctggccaacatggtgaaaccacatctctactaaaatataaaaaaatagccaggtatgatggcccatgcctgtaatccgagctaattgggaggctgagatgggaggactgcttgaacctgggaggtggaggctgctgtgagccaagattgtgccactgcactccagcctgggcaacagagtgagaccctgtgtcacaaaaacaagaaacaaaacaaaacaaaagacaagaaacctgagaagcgcagtagattcaattatatatatctacttttaatttgctagctctgtgaccttaggaaagttacataacctctctgaactgcaactgtttcatttacaaaatggagataatgatagtttttctctaattggtttgttgtgagataattcatataaagctgatggtgccagattacactcaaaaaaagcattcagctgtcattatcattatgacttcttttgttaatgttatagcctttccttctctagggaaaaggaggccagagtggacctaggctgactgagagaattcagctcagtcttttgaattattttgaggtagaggaatgattgatatagtatagattattaaattaggacttcacttttggagaaaagttcagatatcattgttgtcttatttttcttcactttcccacatttttgcagccatagctccatccatttggttaagaacttagaagctcacaaactcgggtcaaagacaggtcgaaatcctcaaatcccttaagaacttcagcttattcaggaagggatatttacagaaaactagcaattgtataagtctccaaaaaagcatacattacttgaggatccatatatttttggcatcctcagggttgctgtgatgatttatagaaggtttgtttatttaatttactttatttcaaataggttttaatttttgtacccttaagaaaagattcgtactcttccctggcagattaaagaaaatgagcgtatattccctaaccttggccagttactttcctgggtttgagggtttctgtgaacgtctaacttacctctgtgacctgtttctgcaaccaggggtgttgcaatggatgcttttgtcttgaggatgggacctttcaagaaacagattcactgaggtgcagtgggaaggtcagagaaagatcttcgtatcgcctattattatttgctcgtctattttttctcctttcttaaggccactaactgattctcctttgctaaggctgcctacttccactgagaccttgaaccacatgaaattgttgttgtctgtgtttctggtcaaatagtggcaattttgtatgattcaatcttgtcatttaattttttgggaggttattattctatttcataccttttttatacccatcttctttacttcatttacctgtccctcatacttgacttgtagcttgtcccttcactgtcatcgtctggccatgtgggtgtgtacgtgtgtgcgagagagagaatgtgtgagaatgtatgtttctttatgcattgggatttagggtttttcttgcaattgtgatttctctgggcacttttgttaatatagctagtcagcgagtgctctagataattttccttgcctccccctctttgaaagaaaagagggtgttcttagatgtattcttatcagataagccagtagctcaggtgctggtctggctttggtgtcattggggtctgaggttgctgacttttaccttctctgctgaaaaattaccttcagcagaaacgtctgaattgcaaggagaaggagaaaaaaacaggccaaacacagtccttggtactccttgggagccactgagaagagtccaggttcaaatggtcagaaggttattttaatgattgtgtctggcctaaagtaccattagcttccagtggagtttagaatgtggatggatcctgaaaggtattccccagaggtttggattaataggcacaagggaaccctaaaggactctattggcctgatactccccatatccacgtagaagagctttagaagaaccttctgttctgagaccctggctgggcccacccagagctggcccattcaactcttactcctttgccaccactaatggttcttctactagtttttatattatttaacaaaaaggcactttaaaaatgcactcctggcaatctatactggaatatgaaaaacatgctgcaaaaccttgacactccaagtgtggtcttacagttcccagaatcccctccttgaggagctgctagaaatgctgaatctcaagcatctccccagacctactgaatcagagcctgcatctgaagctttacggtgtacaagctgttttatgtgaaggctgaagtttgaaaagcactgcattaaagcgttagtttggtataaactgccctgactgaacttggtgtgtccacttagcttgcatgatgactgttgctttgatgatgaaggcttacacgggtagatcctttgagtgagtgatctgacatgattctcctttgctaaggcatctagattcagtgcacaacttacagctgtttgtctttaggggaaatacaactgtaaaattaataaaaacatagtctcttcttatgataacatggaacgatggcaaaatagattttgttagcacttgggtaggaattctgaatgaagcaggcaaattctgttggcagtgaaatgataggatgtggtaaagttagaataaaataaacttaaatgtctcaaactctcatggtatatactaccagtttaataataatgttgtacctttgatgatttgcagactacaagcattcaaggtgctgtgttatatattacttgcttggagaataatacttcttaaaaattgaaattcagaaattttaaatcagacaaagcttttgtgcatggcccacttaaatggctattttgaaataatgatagtggatatagaaggattattctgtaataggatgagactgttccttttgtcatggagatcataatcatatttttgtaaatttttattatttttttggttttgtgtccatcctgcacactattactgggtaggtacatggttttttaacatggtttatctttcaaaactataaaggcattgcaaacagaagacaggtcatttatttttcttccaaaagcatctaaaatgagattttgatatttgaggtcataaagaggtgagagaacagacaacagttgggaaagctatttctcttgaaattgtttggccttaattactacagtgtcctagtaccacccatacgtttccaaagaagtagatccctgtaaatgcctttgtctctggacttttgagtaaaatagtagggtgtgctttgcaaaatgtcatcgttgatgttgagtttcagagtctttaattaggaagctgaaatctgtatatcgagatttgtaaatcatctaaattgcagagtaatgttttagaatactgcttaagggattggcattaaagccttttttaaaaaagaaatgcaataatttcctcaaatcctcactcattagacctctactaactatagtgctgacttttttttttttttaccctaaagtctggaattccaaagaaatgcttcaccatttcccccattattatagccacctggaagcagtattcatgtattagatcaaaaacacaacaaagaattatgaaaggttgtttcctggtatgcaatgcatgatgacatgaacttacagaacagagagaagggaggctccatgtttatttaaagaggaaatttttattttctggttacctacttttacatgggttacatcaaatcccacgatgaggtttaaaaattctcatagataatcaaacgtcattacttggcttactgaaattcagacttttcttttttcttccctgtttttctctatcaaattagaatctttggaagaactaccagaaacgagtgggaaaacaacccggagattcttctttaatttaagttctatccccacggaggagtttatcacctcagcagagcttcaggttttccgagaacagatgcaagatgctttaggaaacaatagcagtttccatcaccgaattaatatttatgaaatcataaaacctgcaacagccaactcgaaattccccgtgaccagacttttggacaccaggttggtgaatcagaatgcaagcaggtgggaaagttttgatgtcacccccgctgtgatgcggtggactgcacagggacacgccaaccatggattcgtggtggaagtggcccacttggaggagaaacaaggtgtctccaagagacatgttaggataagcaggtctttgcaccaagatgaacacagctggtcacagataaggccattgctagtaacttttggccatgatggaaaagggcatcctctccacaaaagagaaaaacgtcaagccaaacacaaacagcggaaacgccttaagtccagctgtaagagacaccctttgtacgtggacttcagtgacgtggggtggaatgactggattgtggctcccccggggtatcacgccttttactgccacggagaatgcccttttcctctggctgatcatctgaactccactaatcatgccattgttcagacgttggtcaactctgttaactctaagattcctaaggcatgctgtgtcccgacagaactcagtgctatctcgatgctgtaccttgacgagaatgaaaaggttgtattaaagaactatcaggacatggttgtggagggttgtgggtgtcgctagtacagcaaaattaaatacataaatatatatatatatatatattttagaaaaaagaaaaaaacaaacaaacaaaaaaaccccaccccagttgacactttaatatttcccaatgaagactttatttatggaatggaatggaaaaaaaaacagctattttgaaaatatatttatatctacgaaaagaagttgggaaaacaaatattttaatcagagaattattccttaaagatttaaaatgtatttagttgtacattttatatgggttcaaccccagcacatgaagtataatggtcagatttattttgtatttatttactattataaccactttttaggaaaaaaatagctaatttgtatttatatgtaatcaaaagaagtatcgggtttgtacataattttccaaaaattgtagttgttttcagttgtgtgtatttaagatgaaaagtctacatggaaggttactctggcaaagtgcttagcacgtttgcttttttgcagtgctactgttgagttcacaagttcaagtccagaaaaaaaaagtggataatccactctgctgactttcaagattattatattattcaattctcaggaatgttgcagagtgattgtccaatccatgagaatttacatccttattaggtggaatatttggataagaaccagacattgctgatctattatagaaactctcctcctgccccttaatttacagaaagaataaagcaggatccatagaaataattaggaaaacgatgaacctgcaggaaagtgaatgatggtttgttgttcttctttcctaaattagtgatcccttcaaaggggctgatctggccaaagtattcaataaaacgtaagatttcttcattattgatattgtggtcatatatatttaaaattgatatctcgtggccctcatcaagggttggaaatttatttgtgttttacctttacctcatctgagagctctttattctccaaagaacccagttttctaactttttgcccaacacgcagcaaaattatgcacatcgtgttttctgcccaccctctgttctctgacctatcagcttgcttttctttccaaggttgtgtgtttgaacacatttctccaaatgttaaacctatttcagataataaatatcaaatctctggcatttcattctataaagtccaacctgtaagagaaaatggtgcatttgtatagcgcttacaatgatgaccttgtgtttgcatttttgtttctgaagttatatattttagagggggtgggggaaaggtaatgaatggctggaaaattgcaggcaagttatttgataagtcatatttgcactaaaggtgttaccagtgatttagtatttttcaaatgaacttctttggggcagaaagatttaagggaaaactaaagcctacaaaacaagcaaaacctggataacccgagataaagtttcagagataatagcccatgcaacagaggcaacggtgccagaaaattagaaagggaaagtgtcggagatcagcttctataagaacatctgccagttggactgacgcccaaacagaatgaagtcaaattaggctgctcagattgaacacttaccagagtgtcagggcttctgtaccctgggttagaatcagaccaaggaagggttcagcagatgttcataagagcagggcacccacaactacccactattttactggcagtattttaggtcagtttccaggactttgcatcccctctgatcctgccatgcatgattggtgaaacctacctctaatctccttggaattggctaaaaaacagtgtgtttataatggaacagactgttataatcaaattcttcctaggaattaacttttgatgactatgagcttagttacagttcggaggttatgaggttatgtaaaccttatctttaaatgtgcatgacagttatcttttactaatgctggttaacttttaaaatcttgcagctcctttttatctctagttctattgttcttgattaggtgagaaccattagatcatacccaactgaggggattggggtcttgtttgttctccagctgttcttcaccctctattgccatggacatgaaggacagactgcacggtcttaacatgttaaaacgaatgacccatgttttctcatattcacattctctagatgagagcatgagagtatagcacaagaatttcatcctttggcagttccatccacccttttgatttctctgcttcattggttctaatattcttggttaaaactgttttcaatggtgtcgactaaaatgtgttatcttgcatatgcgtatttaatatataaaacataaaatacataaatatacatctaaagatgtatgtaatatgtagtacatatgtatagatgctggcattttcagtttagtttcagagattttataatcagacactctgaccctcttggaagctcacatgagaaacaatatttttacaaacatcctacattgttacagacattttagctcacagtcttcattccgaggaataaagagtcaaaatgaacataacactgaatgtctttaattgcactcactattctataggatccttggaatcatttcagagttggctttaaaaagtccacacatagtcatttctgaattttcaggggcccgcctttcaaaatcggttaaactgatcatctgtttttgtgcttgtctcgactgcatgtgcccctctggcatggttttaacctgtatggcacgtccgggttaccatgttcattatttgccttcaaaaattaggaaaagagagtgtgggcagcttacagatctatctgtgcttccatcttttcataatttctacttaaatcgcagctttaaattgtaccttaagaggtcaagaatggagagatgatctgtaaacctgatctatataacaagctgtataatcactacattacctaagcaatccatattttttccctcaatttattactggagagggaaaatcatgtgcacaattcaaagggctttcaaaaatagcatatttctatgctactggcatattaatgttaagattcaccgaatgtttacgtgccacagcctccttatctgttctaaggcaaaaggaacatagccttgcagtcaagagcaattaaagcctatagtaattgtggcatagattcataatccaagaaaagttaagaatgtcctggcgccatttctcttctgttttatatttatttatttatttatttatttatttttgtgcagggaacgggtagggtgaaatgggggataagatgcaggtctgctcagcttgggtaaattgcttttcctctttcctccaccctgctgacataaattacagccttttggtattctccagggcagaattttctgaccatttccctggcttgcaaacttcaaagtaaacttctacctaacttaggggaccaatgctctaaataaaactttaattttaatgtgcatccgaattaccaggaattctgtaaggagaataaaactttaacgtgtatacagacccccgggaatcatgttctattagagattctgtttcagtgagtctgggtggggcctgagatcctgcatttctaacaagctccgaggtgaagcccttacaggccaaaggaccacagattgagtaccaaggctataatgaatagcttcgccgtcactgcagaagttggaccaagtttaggcccctctctaagcagcagtacttaaaggaaaaaaaaaaaaaaacagaaaccaaacccgtatacaggatggcatcttaatacttttcaccgtatctgaaatgatgccctacatttttttttttttcaaaggcattttccccccacaagatgactggcaattttgtgttctagccaccctcagacatgaaaacacttggttgcttatcttgtaaaatctgctctgcttgcttgcttgggcatgtatgtagtcagtttagtcaaatacgtgtcagtacatctatgtggatggggagcaggtgcaagcccttaaaaacgtactttaaaaaactttaacacttaagtcagtccactgagctgatcctgtgtgatcttagtgccaagcgtctgagtttaaagttttccctttgaaggcagcaaatagatgtcatacatttgaagcatttgtttatactaaatatgatgcttgatttttttttaagttctaagacagttcactgttcaacaccattgagcctgcagggtggtataaagcttccaaagctggtatttgaggtttgatttaatggatattggaattttcaatgctgcagttggcttcaaataaggtgtttaacatgggctcaggctagaaaaaacagcgggaattgatttccttctgagaaagggagtcagcaaagaaataactttctgcctttgcttggtgacagcacctctttgtaaagtaaaatgtcctgtgaggctcttctgtgtagcagccttattttattttaagaagcacttggaagatttctcacaagtaattcagatttgaatatttgttgaagacatgctgggatgaatggattcctaatctcaaatacaccccttgttgtgtgtacatacgtacatatatgcatatatgtgtgtgtatgtgtctgtgaatgtatatgtacatatgtaatgatttgttcctatctggagtccaaatgccaagcatagggcaccttcttctgttttactgagtttctcattttgcgtaggtctctgaatttcgcattgagtccctctgaggtgcttaagcagtactaagcaagacactgactttaacaccacttaaaagcttgcgtttgccccatgtcctgggccccactccaaggcattgccagaagtacattattgttgcagtccattctgatgaggaggtctctaagcaaaccaccgatctgcttaaagcctccctcataaggagcaggatctcatctggactgcatttacactggaaccgcttggccacaacactatgagagaataattattgaactattttactgtacaactatttccaaattgttgattttttattgatttcaggaggcaagctaattgccccatggcaacttgatgttaacatttaatgaagatcaggaaacacagtttatgaaaagcttttgtatagtaactgcaaagtttcaagaactgttttatacttcctgacagtgctgggcctagcttaatggtttgtttttattgcttaagagtgtaaaccttgctttagcccggtgtgtggaaactataccctcatcctgcattacacattttctcattgctttttactcactcctgacttcctttcctgatatctacaattgagactttttctgttttaattgtctcaaaatgagttgctatctttgcatgttgagaatctaacacacacacacacacacacacacacgtgcacgcatacatactcatgaagttaagtgtctgtattgtttcactttgttttgggtggagtctcttttcggcacttggttgctagacgaccaagcagacaaaagttaaagattgaaaaggcatttttaaagatgccaaatcttggcggctgaattattttatctgtgtctttctatggagggcttagtattcctaccaggttaccattgcttttgtcggctagatggctggtagaagatttttttgaagtctagctcttaaggcattatctgtttgagaactttgttaagtgttgttcccatttgagggagcacgcttcccacctggattgacaaaaaaaaaaaaaaaaaaaaaaaggccagccagtttccaagggtgtgttttaaatcactaataaagtggagctccagctcccagctgcttcaattgtttcaaggcaaggaggaagagaaaaggttgcttttggaggcaccattcagatatacaggctttagtgtgtggaggctttagtgtgtggagaatactgtttccaggaagctaccgttgcttttttggtagatagtactggaaaagtttttttttttttaattctttaaagcctaattttaaatcaaagtcatttgttcatttcggtaagatgtttcaggagcatgttataaatacacaatctttatagatatgccaagttagacatgtgttcacaagttcatcttgcatgtgtacacagtttgtagctgacatgcgttcctcactgagggcttccattctttctcattcattctgtgagatgctgaatctttggctctccgctttgtggggtctgctgtgctggaattaagtcacatctatggcaaacctcagctactttcctggttcatttccaggcagggtttcctggcatggggatcaattagggagccctgaggtgtgctcatcacagactctcttgaaaattaggatcttctgaaacctgtctggcctatatatgtaaatttgacaaaatattcctctggaaggaaatcttactaactgacttagaaattgttcaatcactcggtttaactggtaaacctacagtcctccaggacatatcagtattgtcaatattataatattacaaaccatgaaaataattatgcttaaacactgaggccctgaagtgaaccagactacaaacttaataatagtcaatcgataagctaaatagaaataggaaaacagattcaggagaatatttcaatacttcctaatctcataggatgtggagcgtgtttgctgccacaagatagctcagctgaatactagaaaatggggagaaatggagaagttaggggtggtttttggttaaaaatatgcatatacatatatacaaatatatatacatacacatacaaacacatacagacacgtatgtatatataaaagtgaggtcaatgctgctttcaatagcagaacagtgattgtttcttttttgagacggagtctcgctctgtcctccaggctggagtgcagtggcacaatctcagctcactgcaagctccgcctcctgggttcatgccattctcctgcctcagcctcccaagtagctgtagctgggactacaggcgcccgccaccacgcctggctaattttttatatttttagtagagacggggtttcaccgtgttagccaggatggtctcgatctcctgaccttgtgatctgcccacctcggcctcccaaagtgctaggattacaggcatgagccacagcacccagcccagaacagtgatttttaatacaattaaacaacacaatcatccctttcttggtgatggtatgaagcattttacctgcatagagcagggcccagaagctccttttgaaggcttcctctttattgaactttggagaaagaacacttctcagctgaaagagaactgaagactaagaattctagaatcctctcaccaacaggtgcccaaaggaaaatctttctgcctgacacacaagtatcagattttgtatgaatattatgttttgtggaaatttatctttgggaggttgtcatattagacatctacatgtaagctccaactcttctctctctttcgtgagtaccctgatgcctgagaagcccttttgatggcacaggcaggtggaggccaggttgttgtaaggacactgcttttgtgcctttgttcagcctcacccttggtgtgctttcgagtgcactaaggtactattgaggatttggtacaaggagcagagagagggctgcttgaaattcctaaaagacaatcaggtgcattcttgtacatggcaggcaatgttgcaaagcactctcattcccagaaccaagagggaaaggacactgaaactgtgacactgccatgaatcatgggaagattagttaaggaacttttatgagggaggggacaagtttgtgttttatgtactatttctggaaaattcaaggagtggcaatgtttcagtccccgtgatgtgaaaataagaaccttcgtccaatggcagctggtgctgaaatgcaactttctggaagtctcctgtttaatgggtctgtgaggttttgacctctgggtcccaacggatcccaggacccacagtgctgttctgtgataaggtaagttacctggtggtccttttttcgcaggagtagaaattggtatcattaatcttgtccccatcacttacgtaatcctcaaacagtgtgactagacttatcctatacttttcattttacattcagttccctttcattttttttttttttttttttttttgagacggagtcccgctctattgcccaggctggagtgcagtggcgcgatctcggctcactgcaaactccacctcctggcttcacgccgttctcctgcctcagcctcccaagtagctgtagctgggactacaggcatgtgccaccgcacccggctaattttttttgtatttttagtagagacggggtttcaccgtgttagccaggatggtctcgatctcctgacctcgtgatccgcccgcctcggcctcccacagtgctgggattacaggcgtgagccaccgcgcccggcccagttccctttctgtttctctctccttttctccgggtgtcaggaacttttgtggagataaggaaatgtgctaggggaagaggagctgaaaaagtcaaccttatttgctacaaagtgagagcaatgtggtcctgtgtcatcgcaaacctgagcgtttgttaaacctgactgaagctgtgcctaagatctcctgtgagcggccagtttggacacagaacaggatcctattgtgtttgtccttttccatggtaatgcgactcggcttgggaggaagagtcatttcacaggcttccctcgtggaaaatgctggtggtgagggagaaatggctctcctcccatccctggaacaccagttctgggatgctgagaagggctgctccagctgggggtggggtagtgggggcggggagggagctggaaatccactggcttcagcggggtgtaagcacggaccaaagcgcctctcctctgcagccagaaacagtgattcatttgattttaatttttaacattagcatttttctcatgactcactgataatttaatatggaatttaaaaggttgaaacagttatttactttttaggaaattaaaacattccctaggtggatatatattttccctctgaaacagaagatgtactcgtggttgattaaaaaaaaaagaaagaaagaaagggaggagtgggcatttctctcacccttcccttcccagctcccaactgcacccgtacaccagttgatctcgctaatgttgaccgactatcagccagtctgtttcttcttattctttctcttatattgaattgctcagaaaactgggtgaaaatgtcaccccagcaaatacttccctactatcatttacctccttggtcttcgttgtagcagtattaagtgagggcagtctttctcataggtattttatgaatcttgtgagctaagatcctgcccaagatcatagatctttctgaatagttttactgagggtattgtaggacttctgctgaatggatgaggaaaaacctgggctggcacaaggatcttgtcataacttaaaaatacacacatacagttattctcgctaactttctgatattaaatgcagttgtaactgggaaatttgctatataataatgggttgtaataaaaaatgtgattcatccaacagctcccacttcataattttttgcatatctgcagaacaacaccaatgaactgatgctcagaaacttactttaatgaataggtaataattattctaaatcgggatagcaaggatatttttgtgccattgcacaatgccaagaacattctcaggagtctaggcatttccactggaaacttgcatattcattctgatgactataataaagaggatatggtagatctctgcacagaggatcctttccccatcatccttcctgtcttccagttctgttctccaggagaatgtattaggaagggaaaaagcaaacggaaagtagggtgctccagttctcagtatttgcctgcatgctcaagttagttgtgagatgtggctctcagcattttatactaaaatgaagtatcatattttatgcatgatatccttagaacagaactgtgcaaaacagtagccactagccacttgaggcaattaaacacttgaaatgtgactagtccaaattgagatgtgctgtaattgttgaatacgcacctgatttcagagttagtatgaaaaaaaaaagatggaagatgacacattaagaattgctacattgatttcacaatgaaagggtaatattttggatatagtaggttaaataaaatgtatttttaaaatttattttatcatttccttttattttttaatgtagctactagaaaattttaaattacacgtatggctagtattatgtttctgttggacagtggttagttagagcaataaattagagtggactcgcatcacttgcgttcatttccagactgatggagtttctcaggtgacagtgaaaatgatgaaggtagagccaacacttacatagaaattcgcgaatagctataggaccccgacaaaggttaatgatgttcatctactgtgtcttagcagagaaaaagctgggagccatcgacatggtagaaagagaactggcttcacgttttggaagtctgtgttgcactccagctttgcaggttgctaaatgcatgtccttcgggaggtggtttaacctatcagagcctcaatctctttgcctttaaaacagattattctagtgctttctatttcataggatattttttagaacggatgagacaatgcttgtaaatgtatcattgttcaaagtaaatatggtttataaagtgaaaattgagtaagtggaccctgtattaggtgtctattactgcaaaacaagttacctcaaactgtgtggtttaaaacaagcttttatcaactcacgtattttcgaagggttaggaattcaggagtatcttagctgggtggcactactacctcagaatctctcaggacatggcagccaaggtgtcaaccagagctaaagtcatttgaagacttgagctaggcctggaagatttgctcctaagatggttcattcaacatggttgttgccaagaggcccctgttccgtcccccatgggcctctctatatggatgcttgagtgtcctcatgacacggtggctaatctccctgcagtattaaacaataagagagaataaagaggaagccacaaagcctgtttgcctcagtctcagaagtcaaacactgtcactttgaccttattctattaggagccactaaatccagtcaagtctcaagggaagtgggaaggggtattgactgaaccccaccttttgaagagactgtcaaaaaatttgtgacatatatttcacctccacagacctttaccatctaaaagtcgatgacacaatttggattattctcatcatatctaactaaatcagcatcgaggaaccaggggaaaaaagcacttggggcacatagcacccaattcaagaattatcctcaaacccagctactgaaaggggctgctgtaaccttaacaccagttttacctcacggctgttgaagtgacccactatgactctaagagtaattttacctaaagccatcactcactaatcagagcttgccagctcccagaaacttgctaatattaatgagcattttttttcaacacaatacagaacgtttctctttttaataaaactcccaaccttctctttgttctttggacacaacagagaccaccatggtctatgtgtatgccccaaattgcaattctatgattcccaaataaaatattgagtttagagatttgtctctatattttatttgatgttgacaaccacatttgaaaacaggaaaaaaaaactgtttctataagggattgagctcatggcctagttgtcttcagagtagaacaaacttttggttctgttggagtctctgaataacaaaatctccaattgaacttcacattcattagaactaacaatttgaatactttgcccatcattaaccataattcattttttgagatacagcagaatagcctcctggagttctaactcctctctcttcccaagcaaaggagctcctgcagaatccatggattcagtaataagcatgagaagaaagacgtaattgtgccgcagaagtcaggaggccataggagcaggttgggaatgactgtggttcttgagcctttcgcctaccactgccccttcttcatacccttgagcagcctttctttttttaatcaatggagattttaagaagaggagactgctttcctagatttcagaatacatgtggaagcattttatatttccctgctctactgtcttagtgtatagggaattttactggtatctggattaaattaagtccttggtcttccttatcccctctttgtcctaaagctgtctccctagctagagaacatttattttgggaaagcctttatgatattaaaactcatcctatagtacctgtcttatttgcagatggacaaaacatttcccttggccctttgtggaaggttgactattggatgtctgtttctttcctagaaattgtggtttttttctccttttttgagttttgatacttcccagaggaaaagaaactcataatataataactaccactcagaattctccctattctagaaaaatacaaagtaagatggacctttctccctatatttcagggacatttaaatgaataacaccaacaacttgatagaaacttctttcacttgagaggaaacacaagaaaaatataaatcagcagaatactgatatgcatgttaaaattttggagtcaaaaagaaaaataattgtaggctgggtttatatttttgaaatatttaggttcaagatttaccatgtcagcaggtgtggtgccaatctaaactaccttttgaagtgagcttaaataccaactaattaattgcaaaactaatattcttgagaatctacaaaaaaaaaaaaccagtctttaccaataaataagtaaacatactgatcagtgaataattactaaacacaatatgctgtaaaggaatcagggcactgagctagaaaataccaggtacctatttaggatgatccctccgaggaagtcagcaagctggaagttcatggaagagaaagagacctgctaagccaagtgtttggatatgcgaaggtaggcagaagggagcattccaagcctctgtgtgcccccaaaatgttatggagtgaaatagtttgatgtcagtgaggaagagggagaaggccatggtaggaggagcatcttgatcatgaagagaggaataaaataagaccagaaggtaaacagagctcatatcatatcactctgctattctaaatctgctggaaagttatttaaggcatatgaaacaagggtgaaatgagatgtaatgaatttttttaaaaggtaccatgactgctcgtggagaatagattgaataggaaaggagaaatggagaatgattaggaagctgcagtaggaataattttgagctggccctcaagatttctgctctctgatgtatgcactctgcagaacccttgcctttgagagcagctgacctgtaaatacgatgggaggcaatcagttgactctgagttaatcagaaggagattatcctgtgtagcctcacctcaccaggtgagatatttaaaagaaagtgaacaggcagagagagtactcctactggcctgggagaaagcaaagagccacacggtgaactacccatgtgggccatgtggcaaggaaccgtgagtagcctctgggaactgagactggtccctagcaaggagctaccaaaggaagcagggccctcagccacaaggaaataaatgttaacaaggaagaggaccttggtcctcagataaagctgagagccctggtcaacaccttcatttcagcctgtgagaccctgagcagaagtaccagctgccacacctagacttctgtccatggaaactgtgagataacaaatttatgttattttggcgaggtgcagtgggtcatgactataatcccagcactttgggaggccgaggtgggtggatcacttgaggtcaggagctcgagaccagcctggccaacatggcaaaaatgcgtctccactaaaaatacaaaaaaaaattagctgggcgtggtgatgcacacctatagtcccagctactcgggagactgatgcagaagaattgcttgaacctgggaggcagaggttgcagcgagccaagattgctccactgcactccagcttgggtgacagagtgaaactccatctcaaaaaaaaaaaaaaaattatgttattatattttaagtcactacacttgtggtaaattgttacttaagaaataactaatgcataagctatttgcggcattccagcttcaaaaagatggtgcttgtattagatttgtggtaaggaagatggagagaaatgagtggatttgagatcttcttcagaggtatatttgacattactggctgatggactagacatgtcaaggaaagaaaaggaagaactaaacgtaatttttaagattttttaaatttgagctacttagtgactagtgatcacaatgaatgttatcacagtttcagctatcataatttcaggaggggaagcatggaggaagaacgtgatgctagggaaacatcatgagttcagcttggacatgttgaacttgagatgtttgtgaaatatgcaaacggtattgtcaagtaagcagtgggtatgtgagatgaactcagaggagactcttaggttggaaatggaaatttggaagttatcagcatatcagtaccaaagccatggaaatggaataggaaagaaaaaggaaaaggggcttcgaccaaacactgaggaattttgacatttagaggtcaatagaggaagtagaagtgaaaaaaggctgaaaagaggtggcctgaagagcacagggaaacctagagagtgtggtaccatgaaaaccacgggaggacattgttcataaaggaggacagagtcacaatattgagtgctactgacatctccaggaagaacaggggtttgtgaccttgatttaagtgagccattagagctttgagcaggagccaggctataaaaggtgaagagtgaaaatattgagacagtgaacatggacaattctttgaagatgtttgtctgcaaatatagcaaagtgataaggcagcattttgagggaagtttgtgtataagtgcatgtttgtttaatgtgagctattaattcataactatatcctaaaaaagggaaaggttgataataacaggggaagaaaaatatttcaaatagatccaagtatctgagaaggttagaggagatggattcagaatacttggaggaaagactggcttttctcagttgaaactagaaaaaagaaggtggaagtacaagtaggcaatttttctttttaatttttaatcttgaagtcagtagagattcatgtgtacctttcatacaatttcccccaatggttatatcttgtatcattatagtacaatagcaaacactagaatttgacagtggtacaattgtgcctatttccatggcattaatcacgtgtttagatctgtataagcatcactgcaatcaaggtattccattatcacagagatctattttatgcttttgtgctgctccctaataaccattcccactcccttcttcttcaacttccctaaccctctgcaaccactaatcttttccccaggtctataattttgtcatttagaaaatattatataaatgaaatcatacagtatatgaccttttcagatgggctttttttttttttcactcagcgtaacgcccttgaaatgtatccgggttgttgcacgtatcagtagttcattccttttattctatgatatggatgtatcatagtttattcagtcattcaccttgtgaagagcatctatctgatctgattccagtttttggctattatgaataaagctactgtgagcaaacatggttctaaagctgctatgaacaatcaggttttggtgtagatgtaagttttcatttctctgaaataaatgttcacgtgtgcaattgcttggtcataaggtaatatcatttttggttttgttaagaaaacatcatacactttcccacaataccattttactatcaccagcaatgtgtgagactcggtttctctgtatccttgtgagcatttggtgttgtaactatttattttaactatgccaaaagttgtgtagcttgtgttcttaatatccattttcctaatgcctgatgatattgaacatatttccttgtgcttttttgccacttccttcaataaaaaatctcctcattttttttgtcatgttctaattggattgcttatttttaacgagttttaagacttctttatataatctagatatgaatctattctcagatatgtgatttgcaaatattttctctctcagtctgtagcttgtcttttttcatcttaataggatcttttacaaatctttttcattttttttatttttgatgagatcaaattatcaatttttcatttatggattctgcttttggtgtcatgtctaacaactctttgccaggttctaggtcttgaaggcttttttctatgtttttcctaaaaattttattaatttacatttaaatctatgatcctgatccattttgagttaatatctatataacatgtaaggtttaggggtctttttgcctatggatatccaattactccagcaccattggttggaaaaaacaggttcttccttcattgaattttaccatcgtcaaaaatcagtttttcatatcgaagtggggctgttttggggttctttattctcttctattgatctatatgtcaatctgtttgctaatactatacattttcagccaggagcagtggctcacacctgtagccccagcatgttgggagacccaggcaggaggattgtgcaaacccaggagtttgaaaccagcctgggcaacaaagtgagaccctgtctctacaatcaatcaatcaatcgatacaatagtatcatacattttcacaattatagctatgtaagtcttgaaataaggtacagtgattcccctcactttcttcttttatagaatagttttagttattccagttcttttgcttttccatatacatttcagaataatcttacctgtatctacaaaaataccatactaggtttttgttggaattctgttaaacctgcatatcagtctggggagaactgatatttttactccattgagtgtttgaatacatgaacactttgtctctccatttatttctaatttttaaatttctttcattagcattttgtagtcttcagtatcagagtcctgtccatattttttcttagatttgcaactaagtattttatctctctcttttaatggtttttacatagtattgtattttaaatttgtttcaacgtgttaattgctaatatatagaaatacaattgatttttggatgttgaccttgtatcttgtgaccttgttgaatttatttatcaggtctagaagtgattttgtagattttatggaattttctatttacatcataatgtcatctgcaaataggacagttttatttcttcctttccaacctgtattccttttatttccttttcttgtcaattgcactggctagaaattccagtaggttgaacagcagtggtgaaagtggacatccttgcctcattcttaatcctatgtggaaatcatttagtctttcatcactatatatgatgttagccagaggtactttttaaaagatgttagatattattcattgggaactgagtataggattcttagatgattattattttctcaaagaatttcaaaaatattgtgccacttccttctggcttccatggtttctgatgagaaatacactgtgatttgaattgttttacccctctctggctgctttcaagattttctttgtccttagttttcagaagtttggccacggtgtgtcttggaatttgtttctttgctctttttttgttggtttgtttgaggttcattcatattcttgagtctataggctatttttttccaccatatttagaaaatcttttgccatttcatttttgatgctttttaagcctcatctttttttttttttctcctttccttctgggactctgatgacaagatcttttgtgatagtcccacatatacctgaaactgttcacttttttttacactctgctttctctctgatctttgaattgggtaatttatattgttttattctagttcacggattctttcctcggtcttcttcattccgttgttgagcccatcattgagttatttatgtcaattattttgatttttagttctaaaatttccatttgattcttctttagatcttctattcttttgctgacatttcctgttctttcatttatttcaagcctgggtgagactgctcatggaagcaaatttatgctgtctgctttaaaattcttctcatcttagggcagcatctgatgattgccttttatccattagtttgagttcttcctggttctgggtataaccagtgatttgttattgaaacctggacagtttggattataggattttagatcttatttaaatcttgtgttttaggaggcctgctggatgaagggggagaagtgccaccttcactctgccaggtggggataggagtccaggttttccactctgcctccactgacaggggatgaggggctctttgttactgctatgtggggatagaattttgggatctgaatctggcttgcactgactttgtgaatagggggtatcattatcccaagagagaaggtgtggagtatctattcctgccgtgaagcctgggctctcacttggcttttgctatcagaggtgtggataggactgaagtttctttctgtggtatttggctgagtagagtggttattatctaaatgcttcgtgtcttgctagactattccttacttcgtcttttggccagagtgcaggctttcctgtgggcttttttttttgtctgtgtccactggtgtttttaagatgtcacttctctattatccactctgggatgtatgaagtaaaaagaaacaccagggaacttaccacctgtgttcttcaagtcctaatgtccctagctagcctgcctttctctctctccctttcagatattcttaatttatttaatatataatgcccagggtttttagttgaacttagaggaatagggaaaagtatgtctacttcatcttcctggaaacagaagtctcagcagatagtttttatttgttcttcaaatgtccttataaatctgcagagtaaaaggtgataaatgatttcaattttccaaagggaaaaattgagacacttaaaggtaatttacctgatcaaagttacctagaaatacagtcttagcttcaagtaaaacctcacaattttaaatagctattattttgcttttctttttttctctctctgctaaaaggaaaaaaattactgattggtagagggaaaggaagaaatggttacccacaaaaagactaaaaggactatttttttggcttggaagcagtaactgtttaaaattactaaaggaggacttttcagaagtgattacataatcttctcagttactcctttatatcttatcttataaatgaatgactttaattatttatactatgtcctgaaacttaagtgtcaaggtgcacatttcataatcattgtcactctcttgattaaagactcacacaaaaacaggaaaaaggatgaaactgtttcattactatattaggccattcttgtgttgctataaatacctgaggctggataattcataaagaaaagaggtttaattagctgatgggtctgcaaacagtgcaagaaataaggtgccagcatctgctactggtgacagcctcaggaaggttacaatcatggtggaaggtgaaggaggagcagccatctcacatggtgagaggggaagcaagagagcaagggggcagtgccacactcttttaagcaaccagatctcatgtgaactcagagtgagaactcactattgcaaggacagcaccaagtctttcatgagggatctatgcccatgacccaaacacctcccaccagactccctgcaacattgtggattattttttaacatgatatttgcaggggacaaacatcctaactataccaattactttgcagggcgttcatctttcatcagaaccccttgggtcctaggatttctgtaggttgcgtagcatttcaagaaagattttagactgctcccttaaaacccattatctgaagttcttgaaatgtttccagtattgcagaggcaatgataagctcagggaattaacttccctgagcaaattttcccaattctaatatatttcctaatagagcattcataggccctctttccctattttagttttgatcatttagcaccacactttaaaatttactgagtctaaaatccaaagactggggaagatgggaaagacctttcagggacaagtgaactggcctacagttcgctcctattatggccattttgattcacctagctcatatgagtttagatgtggcatatattgcaggaataagggtggcaaatggcatgttttcttcaaaagaacatagaaaccagcagagggtggttggcagagcagagggagataaaggtgtcatcattccaatggaaggttctctttgcttccagggagagtcaagagttataactttcctggatttactgagggatgtgggcttccatcccagctacctatggctcaggaatccagtgaattgcttctgtcctgtattctgtcccctggtcttcccacacagctcagcacaagaaaaatgtttctttgaaggaagcagcctctaggacctatgacaattttcaagattttttttttttctaagttgcattctctccgctacagaagtggctcagttgatgctttggaagttgtctcagctggttcaaaaagctcctatgttaccttcattttcagggacagcaatgagcctgactctcctgcatctcctttgtctgaggcatagaccactgactgcttatggaaaagaacagataatgatatccgtctcctgcttccacccaccactcaatgtaactttctgccatgaacataaccagccacacataaactgtctgcagaaaaggaagttccatcctataagcttggcaggagggtatgtagggtcaacaaagaaatctctgctactcgtttgcagtcatttccatgaggctaattgtcacctccagaaatcagcccagaaggaataaatgcattttcccctgataaaagaaaggacctaaggaaatggggattgcagattagccctttcacaggaactgactgggcctgtaacagccatccgagtcctgctaaccagcagataaactagataagagtttacattagctttggctgctgtgaggatgcctctgctctcttggactccagaacagttggttcattaaagtaccagggtcggcaagtgccagggtcataagtctgagtatttatgttttataatcctccattcgatgttcttttttgtatgtgtctagagataacggtttctctctagatccatccttctaggtaactgtatggcattcaggaaggcatctgtacaatttctcctctcttcagaaatcaaaactactgctgactgcagcaaagagtaaggaacacttagagagatggagcaatatttcaaaaatacttcttagaaaagaattggaagtctttgcatttctaaatcctacgcttttatgttttcaaatgaatcagatgatattgtgtcaacaaaagcatatcttatttcaacacttatttctatatctcagttggaatttcgatactctttctgtcattttcattttcttctcatgccatgtaaccttgtcccgtttgagaaggcatgctaaaaagtttgcaaagaataatgcagtttacttctatgttcaaacattcagtactctttctatataatacttctaattgcaaaattttgtgcacctagaaagaggatctctctatctaaatattgatgtcttaataagttcattgtactgatgtcttactaataatctcaaggagagaatttatttgtaatgctgcaatttcaaagtgcaggtgttgtatcttttattcatgtttagctttcagaatccactgagtgttttaaatggtaatgaaaaggctcaaaggttgatagctgtgcttggagagggatagtgaattagaaagatctgctacctgactatgcattcattttccaattttttggaatatatttttcaaaattcaaaaaatatttataggatgcctattatgtagtgagtggtattataggccatgggaattcagtagtaaataaaaataaagtcatcatttgcatgaagcttacagggcttccatatctattccagatcccccctgttctcttgtactcaaagtgcagagcatccacgttgcctgggatgttataatagaattacatgatttcagattcctctccaaatctcctgaacaagaatctacaatctactaagattcctagaggattcacgtgaatataaaattctgagaagtttgccaaatgtcagtttaagaacctaggctgtagccaatcatatatggtattcctttgaccacagaaattggctcaaaagggtatgttgccaaggtgattctagttaaggaagattttttttttctctaaagaaagacccagaggatgaaataatccctttattcctctgtctggtgtgctgcccagggatgattccttaaactgctgcagtctgatgataaaggtgaggatggacagaggcaagggagacacaggaacacaaagcagaagcctgattgaactgtacttgattcccactctctctctggaccttgtcagttacagaggccaatacatccctaatcaccccaactgatgcacttgcataggctgcttcctagatacttggtggaaaggcccatatgtcaaaatacaacacacaccaaagtgggtacatgtgatcagatcaggcaacctgtcagcctagggaccatccttaccaccgcctgcaaatgaggataaatgaggtgcagttttggaaaatctctgggcttgggaccaatttgggcagcaaggtggaggagtgaaacagcatattttgctgatagagaagagatagtggtgagtcatacagatacacagatgcttggagttgttgtgaaagagagaagggataagcccttggatgactgaaatgggatttatgcaaggtggccttaggcagaatcagtactccctgcctgcctcttgccaccctcacttactctcactttgtttcttccaacaccccaagcaagtcagtagttctctgcggccttctgttcagtgcccactcttttctcatcttttctccttccctatcttttctccttcccctcccacctcatcccactgcactttcccatcagtctcacgtgatggggtttgtgaggaaataatgggtactaatatttgcttcaagaaggagttttctcctcctcctcctccttttcctactcctcctcctcttccttctcctcctcctctcctcctactcttcttcttctccgttctccttctccttctcctccttcttcttcttcttcttttttttttgtcgagactgagtctcactctgttccctaggctggggtgcaatggcgtgatctcagctcactacaacctctgcctcttgggttcaaggtattctcctgcctcagcctcccaagtagctgggactacaggcatgcgccaccacacccagctaatttttgaatttttagtggagatggggtttcaccatgttggccaggctggtctcaaactcctgacctcaagtgatctgctggcctcggcctcccaaagcgctaggattacaggcatgagccacctcgcccagccaagaaggagtttcttatgtgacttatcctagcactgacctaataaaggggaaagagatctggtgtggactcccatcttccatgcaacagctgcctccactgccatcacacaggaccatcccggagatataaaataattctaactactaccatttctggagcacttatgtatcatactctgcatactatctacttgaaatgccacatttgttttaatccttttagctgtcaagagaatacatgattttatatacattttccagttgaggagcttgaggtctagaatggttaaaaattcttgcccagccgggtgtggtggcttacgcctgtaatcccagcattttgggaggctgaggcaggtggatcacctgaggtcgggagtttgaagccagcctgaccaaagtggagaaatcccatctctactaaaaatacaaaattagccaggcattgtggtgcatgcctgtaatcccagctactcgggaggctgaggcaggagaatagcttgaaaccaggaggcggaggttgcgatgagtcaagatcgtgccactgcactccagcctgggcaacaggggcgaaacttcatctcaaaaaaaaaaaaaaaaaaaaaaaaaaattatcgcccatagtgattaagcgagaaggagagatttgaaactttgtctttaaatggacaaatgccatattatactactcatttgtagaacttagggcgtggttatctagttgtaatttatattctcaagcagacaatttgttgaaagttttgactataagagcctgtcaaagggctatgggtgcctgggtctgatgacacattgacattctctgactgtttgctgagccaagttcatgttcacctgtggcttttaccaagatggtgctctgagtgttttagtgcagcagtctcacttatacttttactgttactgtgatgcttttaaacatcacttagctatgttttgctattttaagtacaattattcatcctataaagacccttgtaaagaatttaattccagctgcttttgctgatagctgaggaatacaaccctcagctagataaaccaatatactgggatttgtggttcatgagcatcagtggcaggaccagaacaagaacccaggtatcttaattcctaggttttccaaactccaggttaactgttgatttttattttattttgtaataaagtgatattttgtagatttattcccctcaagagaccctttgctggagtttcaaatatatgcaattttattttagaggcaaattcttccagatagaaggagtgaggaacagggtaaatcctgtcaacaaaaatgattaaaattgtggaaaacaatcatttcagaattcttaaatccaccaaaggtataaaatacatatagaagcatttgttcaaaaaatcctgccaaaccttggttaagaactatgaaaatctaaggccttttagcctgggatgctcctgttcaacccatccgcatgaccatttcttcaggtagtgaagaagttctactagggcatggcaagttgagaaaaccagtaactgcactgctggaagaggatggcttgatttgaaacagagtgcataggaaaagcctcatccataaatgttgtggaaaagaatatgatctcatggcaaacaaataagaaaggctatcatgacaactagcttgaagctgtaattctgataaggcataataataataataataacagagagagacagggaatgatatggctgtagtgctctttgataagctccaagatatctctaggcttctgaaaaggtaagtgtctgtgcaaagctatgcactcaggagagactggaaaagtcaccagctatatactcattctggctgattataaggctttgcacacccagaaagtaaaagccaggaactaaatgcatttccaaatccacacacagttctactaccaaatggtggaggcattactggctcaaggtgttgagtacaacctctgaccaataactgactgatgactagagtatgctaacacaaggaaaatctctaggaagccagactcaacgagtaagagcaagaacaacaacaaaaatctaagcaaagacattagaggctatgtaccatgggggaggcagactccacagaattagttcaggtaaattattaaacaaaccaagagaagcaacaaaaataacccccctcagggggagagaatagaaatcctgaattgctacaatatattatctaaaatgtacagttttcaacaaaaccattgcaagacatacaaagaaaaaatgtaacctatgtttaaaaaaataagtcactacctaccatttttgaggaatccagttattggactcggccaataaagacttcaaagcagatattaaatgtaacatttaaggaacaaaagaatagtataagacaatgactaatcaaatagagcatcttgataaggagatagaaattatacaaaataggccgggcgtggtggctcacgcctgtaatcccaacactttgggaggtcaagacaggaggataacttgaggttgggaggagaccagcctgcccaacatggcaaaaccctgtctctactaaaaatacaaaaattatctgggcgtggtggcacacacctgtaatcccagctacttgggaggctgaggcaggagaatcgcttgaacctgggaggcagaggttgcagttagtcgagactgtgccactacactccagtgagactccatctcaaaaaaaaaaaaaaaagacagaaaagaaaagaaattgtataaaataactaagtggaaattcttcagttgaaaagtagaataactgaagtgaaaatttattataggagctgaacagtagatttggggtcacggaagaaaaatcgataaacttgaagatagataaatagaaattgttcaaattaaagaacagaaagaaaaaataaagacaaatgagaaaagcctcagaaactatctccaggatagtctgtcaatcatatggagtactatcaatcatgccaactatcaatcataccaacgtgagatactctcagtaatactaacatatgcatgttgggagtctcagaaaaagagaaagagataaaaggtcagaaaaaatatgaggaaatattgtctaaatatttccatatttgatgaaaatctaacctacagatccagtaaacttaatgactccaagtaggatagacacaaatagaaccacacctagacacatcatagtcaaactgttgaaaaacaaagttaaaaaaaatcttgaaaaaacaagagaaaagtgactcatcatatacagggaaacaacaacatgattgacagctgacttctcattcaaaacaaaggagaccagaggcactgggatgacatactgaaaaatgctgtaagaatatgcctgtcaactaagaattctgcatccattaacactatctgtcataattaaaggtgaaataaagacattcccaggtaaatgaaagatgtgtgaatttgttgctagcagacgtgttttacaagaaatacttaaggaaggccttcaggctgaaagtaaattattctaaaatggtaatccacatgaagaaataaaagcatggcaaaagataaatataccaataaatgtgtaagactttaagtatatatacacatttctgcttttttctcttaactggcttaaaatatataagattgcataaaccaatacctatgaaactgcatttctgggcttttaaactataaagttgtaatatatataaataatagtgcaacattttaatttcttattttttcatatatatatgaggtgtgcatgtatatatatgtgtggttatgtgtgtgtgcatgtgtgtgtgtgtgtatatatatatatatatatatatatatatatatatataaaatggttgatttaagactttcaagacagaccttagttcattataacctacttcagattaatactaatttatttcttggaaaatatagaaacatattccaatacaactctattttttcctcccacctttttgctattctctccaaattgatctataggttcaacacaatccctattagaatcccagcagactttttttttaaaaatgacaagctaaattatatatgaaaatgcaaaggacccaaaatagccagaacaactttgggggaaaaaggttgagagatatatatttttcaattataaacttacggtaactgcagtaatcaggacagcatggcagtgtaataagggtagacatagattaaaggagtggcattgaaagtaaaaaaattaagtctcatatttatggtaagtttatttttaacaaagttactctaataattcaatgggggaaaggattgagttttcaacaaatggtactgggagaattgtctatccatttgcaaaaagaataattcagactcctacctcatatcatgcataaaattaacttaaagtttatcatctgcctaaaagaaaaatacaaaactctaaaacttctgggagaagaaacatagtaggaactctttatggcattgtgataagcaaagagttcttagatatggcgctaaaagtaagatccataaaacaaaaattttgtgcagtgggcttcatttaaattaaaacctttagtacttcaaaaaaaaacaccattaagaaatgaaaagataaaccacaagctgggtaaaaatatttgcaattcatatatctgataggggactaacatccataatatcaaaaaaacttttacaagtcaatatcaagaaaagcaacaacctaattaaataatgaacaagccaagacgggcggatcacctgaggtcaggaatttgagaccagcctgcccaacatggcaaaaccccgtctctactaaaaataaaaataaaaaaataaaaataaaattagctgggcgtggtggtgggtgcctgtaatcccagctactcaggagtctgaggcaggagaatcacttgaagtcgggaggcggaggttgcagtgagcctagatcacgccactgcattccagcctgggcgacaagagtgaaactccgtctcaaaaaagaaagaaataataattaacaaattatctgaatagatattttaccaagaagatatacaaatggccaataagcacatgaatagatgctcaccatcattagttattttttaaaaagcccaatttatgctgcaatgagataccactgaaaaggccataatcaaaaaagcagactatagcaaatgtaggaaaggatgtagaaaaactgaaatattcatccataaccgatgagaacttaaacgggaaaacactttggaaaacaatctgacaatttctttaaaactgaaatttaccgcacaatctagtagttcccctaagtatgtacccaagacaggtgaaaacaagttctcctaaagacttcaaaggttatttcttatttatttttaaattcatgacattgccattattttaaaactataaaaaagataaatattgcccacatacataatggtccccaaaatagtctctcctaaaaacttttttagcattgttttattgtggtagaacacacataatatacaatttatcatcttaaccattttaaagtgtatagttcagtggtattaaatacattcataacgtgcaaccattaccgccatccgtttccataactcttttcatcttgtaaaactgaaactctatattcattaaacaataactccccatatcccctaccccagcccctagcaatcaccattctccttttgtcactataattttgatgactgtaagtacctcatatatgtggaatcatacagcaattatctttttattactgaattatataatttagcataatgacctcaagtttcaaacgtattgtagcatatgtcagagtttccatttttaaaatggctgaataatatttcattgtgggtatatacctccttttgtgtatccattcatccacaggtggacagttatattgcttccacattttagctattgtgaaatacgctactacaaacatgggtgtccaatatctcttcaagaccctgctttcaattattttcggtagatagccagaattgcattttctggatcatatagtaactctgttttttgtttttgagacggagtctcgctctgtcgcccaggatggagtgcagtggcgcgatctcggctcactgcaagctccgcctcccgggttcacgccattctcctgcctcagcctcccgagtagctgggactacaggcgcccgccaccacgcccggctaattttttttgtattttcagtggagacggggtttcaccgtgttagccaggatgctttcgatctcccgacctcgtgatccggccgcctcggcctcccaaagtgcttggattacaggcgtgagccaccacgcccggcccagtaactctgttttttaataaggaagtcccattcggttttttgcagtagatgcaccattttacattcccaccaacagtgtgcagggttccaatttccccacatcgtcactaatacttgttactttctagtttttttgatagtagccatctaataggtgtaaggtggtatctcactgtagtttcgatttgcatttccctagtgattagtaatgttgaccatctttttatgtgcttcttggccatttgtatatcttctttggagaaatgtctgttcaagttctttgacaatttttgaattggattatttgttttttgttgttaatttttaggagttctctatatattcttgatatcaatcccttatctgatatttgatttgcaaatattttctcccgttctttgagttgccttttaactttgttggtggtgtcttttgatgcacaaatgttaaggaaattttcatgaagtacaatttgctttttcttttgttgcctgtacctttggtgtcatatctaagaaatccctgccaaatccaatgtcatgaagcttttgccctatgttttcttctaacagtatgatagctttagatctttaatccatttgagttaatttttgtatttgctattagttatgggtccagtttccttcttctctgaaataaaattttatatgtatatttatggcagcattatgcataatagtccaaaagtagaaattatccaagtgcccatcaactattgaacgaataaaatgtagtatattcatacaatggaatattattcaccaataaaataaactgctgacacatgctacaatatggatgaattaaaagaaaaacattatattaaatgaaagaaatcagaggcaaaagggcacatatatgtgattcttttcatatgaaacctcagcaaagggaaatccataagatcaaaaagtagatcagtgggtgtctggggtaaagactgactgaaaatgggcatgagggatcttcctggggggaatagaattgtcctaacactggattgtggttatggctgcacaactctgtaatggaaatgcactgaaactttctgaatttcttaaagtgagaaaagtatagtacctaaggtagacctcaagaaaactcttaaaattttttaaaagctctaggtaaattcaaccaatcaaaaaacaggcaaatcaaatacaaaaaaatttatattgtatcaaaaatttgtgtgtgtgtgtgtgtgtgtgtgtgtgtgtgtgtgtatgccagtcttgccatgaacctcttggtcagtattgaaataatgttccagaaacaaggctacttttgttgagtaaaaaatcaacacaaatgccctgtcctttgaaaatgttagatgcatcttatactgtgtattcctaaacagttgcaagctcctttaggtacttgtttcttctatttatttgctatcatcttctaatggttccccttaggaatccacagtcgaagctcagtcaacgttgactgacagccctgaaagaccctgttgtccactcccagtgtggggagaactgtatgtaatcctttctcaacctaaattcttgtgggaggagaaagagggcacagagccacgtatctgatcaggattgaacctctcacaggggccagcagagaccattgcagtctgtaactacaattgtcacacattcttaccccaaaaggggctttcagaggtcacctggctgagcacaccgcttcccagctggcgaccacctgtcttagtgactttaacactctggattcaaaataggaaaagtgtgtgctcttacttctctggctcaaggcaaggtttaaagatttaaaggtccctgggttctttgggtaaggatttctcattgtgaatataaagggattcttatcattaccaaaacattctgaaaacaatgctgttcctggcgtttaacccaatgtcgtatctgcacacaagataactatgcactgaaatcttactatctaatgttttcaaggtttcaaaaagcaagagagtggtaaataagggggatattgcaaatggaatttctctgcagcctcacaattgagcttctgaaaactccataaaaaaacactaagtgaattaagcctataaaatctgcattgtccccactttttttcctccttgattcctcaaagtcctcaggcttaaagaccccagggaactggcaggtgtagatttccatggaaaccaaccctaaaagaatgaaaacccaaggagagaattgtgtgaagtgccctcactcctgtgtcatttccttgccaacagttttcgaggtcaacctggcttatttcatgaaattagaggccctgctgtcaggatttccccaggcaaaaagggtttgctcagctccattggttgtaaatccacagattgtggttgttctctgcttctagaagaacagccttcacgattctgcctgactttcaaatgccttttatactggcctcattctgattaaccagagccgtgcttttttccacagttagattgggtgtgcttactttaaaatattcattgaaaaataagatattacttaatatgatgttattgaatacaatattcagaaataacgtattcaaaaatattttttaaaaaccacatgaaaagagtaatatgtgtttatagagtatatatatatgtatgcgtgtggttaaaaaacttccaacagtacagaaagtaaaaaaagaaaaaaggaaaatttctatctctttctctctttccaaaggcaaaatggataaaaagtcttaggagtcaccatgatttctccaacactggcctaaggagcaccgtcattaatgtctgcctggatggagaaataagcctcaatttaggaaaatctctaggcttgaaatctattagggaactcctctgtaccttgcttttgtaatttaataaaaatatagcttagaaggcgttctttttttttacttttttcgttttcctcctctcccctcatagatgttttttatctgttcacagacccaactcatgtagtagagcaatggttcttaaacttgagagcacattgaattccctggaggactccgtgcacttcagatgatccacagagctcctgatttagtaggtctggggtggggtctccgaatttgcattcctgagtagctctcaggtgctgctgtgctgcggggtggtgtactatctttaggtagtgctgtcattgattgcttcaagccgacttagagatccacctcggcagttataatatgccattgtttgaacttaccctgtttttatctaatctcatattgtcggacacttaagttctttccaatgtcttcctgttattctcacaacaaccttaagatgagataataagaatagctactatttttgagtacttagaatgggccaagcactgtgaattactttatctgcatagcacttctatcctgaaggtactacattattcttgttttacaggtgaaagaactaagtctaggagaaattaagtagtgtgattaaaataagaagtgagagaggctgggaatctaagaaagactcatctggttgcagagtccatgttctttccagggtctccacccacaaaagtttacaggctagttggacaattaaggatgaaacacaatgaataagaataacagaagtaatgattgccagaagcaaggcagaggagagaagttggcttaatcaaataatccaactgtgactttgcatcccacagggccctgtgcttagaaatgctcctgtttgctttcctgctccagtgtcattgtcttgaaattcttaacaattttttaacaattgtcccgtattttcattttgcattggtctccacaaattatgtagacactcctggaagggttaatttagtcttcaaacttcagccagccaagagctttagcaatgacttagtaaccacattttacagatgatttttgtaatgtttttcctaccatgctttgtttttaccctccaaatggacacactcttgggctgatgttttctacctggaatttgttcagggaggtattttcttgacaagaagaaacatcattaggatgataaatatgaagggagataatactatacacagctttccaaaatcagtcagaaatgttgtctttggtgggggggacgaaatcatttgttaatgctgcatctcctgcccctcattggtttgctaatatatggctatttagctgtagttgacagcctctgaaatttattatttttatataaagcagatattctttttttaatttcatttatttttattttttatttatttatttttttgagatggagcctcactctgtcacccaggctaaagtgcactgacacgatcttggctcactgcaacctccacctcccgggttcaagtgattctcctgcctcagcctcccaagtagctggggttacagactcctgccaccatgcctggctaatttttgtattttttagtagagacaggtttccccttgttgcccaggctgatcttgaactcttgggctcaagtgatctgcccaccttggcgtcccaaagtgttaggattacagacgtgagccaccgtgccaggccagcaaagtaaagattctgaagttttgctacattaactaattttcatctatttcccagggagaaagaattattttcacttttatacgctaaagctgggagaattccactgtgaacacagcgcacaccaactatgccccaggggagtgttgccttgtgtattacatatttcacaccataacaatgttatccgattttataattaacattaaacttttataggaaaaagtaccttgttatactagttgttaacctttggatatatttaaagctcatttcataaggagccatatgctgcttcatcaccgtcctaagtgggctgtgttgctaagtgttatgggatctggtaataaaagatacaaacacaatgtgtatgcccaacaacaggggctgaattaagggagcaacgggagccttaactcttgaatttcctgacttctgtgggtttcatttgcagtctcaacattccagtaatacttcgctttctcacaccacttttttattctttcttcttcaacatccccacctcctctccaaccctgataataactgtttaaacattcatactcacttgcctactgcattgagttatatgattagtttgtacccttttagtgccatcgatgatagggactcattattgagtcaatgtttctaaactatggctctctgacacaaatcaatctgcaaaacgtgtcagaagaaagtactagtgaacccaacaagtatttagaccatttttaaaaaatgtaagcagcttacgtggggatacattctcaagtgtatttttagagtaaaaatagagaatggtaaaaaatggccattgaaaaatctcttacgtcatttctaaagaatatgtgtgggtgtgtatttaatataacaatgatcttcacaaaagcttaaagaacacttacaccagaccaaaagaaggaatcaaagaattaaccttcatgcagacaccgggaaaccatctgtgtcctagcattttcctaggggtgaaaagggaacgggtgggtgaggctaattgtgtcttcttatctttctggggtttacttactttttaaaatagtaagcattcaaatgttaatttatgttaattgattgcttgttcatgaggattaagagaatttgtggagtctcattggatggagggtaacgttttaaagtcagcacctgagttaaatttgatgcaaatgtatatttctggcattaacttgaatttctgtaatatttctattcagagagttgagacattttgattgcattattctccaacttctaggaaaatgtagtaattcagttagattgtgtggagcataaagcagtgcttctcaaactccaatcagcctatgaatcccctggtgaatttttttaaatatggatttggtaggtttgagataggacctcagattacatgttttcaacaagtccccaagacatgttgctgctgtcggtctgcagactacatgctggatagagagagtctaatggaataagtactgcaaactgggaaaacggtagtcatgatacctagctttacttatgcctttttgtgcaaaatgtctttattttagcttcttcacttgaaaacaaagtgagggagaggaggttaccttgctaagtttcttctacagatgagtgtttactcctagttggggcgtatatacacaatacctttaatatgaaaatatttatgttactacttataatgtatgcatacatattttctgcttaacattagaaaaacacaatactgaaactgttaatagctacatccagatatgagttttgagttgcagactaaatatacagaggtgaaagcatctctaggggtgaaatcaactactggttggttgtctcctatgtctgatgctttttgttttactttaaaagagcccagcctgaaatgttataaccttatttaacatagcctgctcagtatttaattatcttttgaattaaaaaccaattatctatgtttaatttaaactctgcaatttaaaagactgtgtccatggataggacctcagctaaatgtgagaatatatatccactatctatttaaagaaatcacagtaggatatgatttatttctcacaagccgtgaaatttcctttcaatataacaaggcatttgggggttaaaaattagattttttaccttgtacatttgtttaagttatttgtagattctggctattagccctttgtcaggtgggtagattgcaaaaattttctcccattctttaggttgcctgttcactctgatgacagtttcttttgctgtgcagaagctctttagtttaattagatcacatttgtctatcttagcttttgttgccattgcttttagtgttttagtcatgaggtctttgcccatgcctatgtcctaaatggtattgcttaggttttcttctagggttgttatggttttcggtcttacaaacaaacccataaaaaagtgggcaaaggatatgaacagatatttttcaagagaagacatttatgcagccaacagacacatgaaaaaatgctcatcatcactggtcatcagagaaatgcaaatgaaaaccacaatgcgataccatctcacaccagttagaatggcaattattaaaaagtcaggaaacaacagatgctggagaggatgtggagaaataggaaagcttttacactgttggtgggagtgtaaattagttcaaccattgtggaagacagtgtggtgattcttcaaggatctagaactagaaataccatttgacccagcaatcccattactgggtgtacacccaaagaattgtaaatcatgcctttatgaagacacatgaacatacatgtttattgtggcactattcacaatagcaaagacttggaacaaacccaaatgtccattgatgataggctggataaagaaaatgtggcacatatacaccatggaatactatgcagccataaaaaaggatgagttaatgtcctttgcaggaacatggatgaagctggaaaccatcattctcagcaaactaacacaggaacagaaaaccaaacactgcatgttctcactcataggtgggagttgagcaatgagaacacctggacacagggtggggaacatcaaacaccggggccttttggagggtggggggctgggggagggatagcattaggaaaaatacctaatgtaaatgacaaattgataggtgcagcaaaccaagatggcacatatatacctatgtaacaaacctgcacattgtgcgcctgtaccctagaacttaaagtataataaaaaaaagaaaaaaattagttttttaatgatgcaaattctgtataaaatatattacaggctgggtgcagtggctcacgccggtaatcccaagcagcactctgggaggccgaggtggatggattgcttgaactcaggagtttgagaccagcctgtgcaacatggcaaaactctgtctctacaaataaatacaaaaaattagctaggtgtggtggtgcacgcctgtggtcccagctactcaggaaactgaggctagaggatcacttgtgtctgggaggtcaaggctgcagtgagccaagattgcacctctgcactccagcctggccagcagagtaagactctgtttcaaaaaaataaaaaatgaaaataataaaaaaaaagagacctgtaatgccaggcactgtcattttcttgtagaatagggcattccatcagaagttatctaatagttggagcctcatactcctgattattccataagccaatgactaatatttcacaatgataatgtctttttactggattcccaaaaacatattaccacattttgataatttaaagattcacacttaaaaaatgttttcattcgttttctttttgatacggtttggctgtgtccccacccagatctcatcttgaattcccacatgttgtgggaaggacctggtgggaggtaattgaatcctggggtcaggtcttttccatgctgttcttgtgatagtgaataagtctcgcgagatctgatggttttaaaaagaggaatttccctgcacaagctctcttctctcgtctgctgccacgtgagacatgcctttcaccttgagccatgattgtgaggcttccccaaccacgtggaattgtaagtccattaagcctctttcttttgcaaattgcccagtcttgggtatgtctttatcagcagtgtgaaaacagactaataacactttttgtgatagattaaattttccatgtactaagaagacataaaaaagaatagtgcaaattgtaaggaaatttaaaatataagttaaccaatgtgatgaaaataaacagaagcctagatctccccatagaagaaggtgctttgggattgctggtttctgtagtcttcttttaccagcaggatggagacagggtccctgatgagaatggggtgattgctaagggtgttggtatggtgagaattcagggtgaggctgctgaccagggtactgagaggggaaattctgagaagtgcagctgcctgcccattccggtgaagagtgaagatggacagagctttgcactgaccctgttgctcttcccgctggggtggccagtgtggaatccaatgagctactaacaaggacagttacctttgcagataaaacaacagtaatttagaggagaattgcaatttactgggattcactaaaagactacccacgagtgaacactacttgctattttatatttgtccaatcaaatttaaaagatgtttattagctcatgcctttctacggtaatgcatcatctttcatgggattgtagagaagctcagtgcaataatttctctggttcaattcctttgctacatataattaatctgcattgataactatggtattttggggatgtatcatttgggaattgcattctcaaatacctttattgtgatgctaaagagtcccaaatcatagtatattaaaccagatatatatatttcctttcatataacaagagagttgaaaggaggtagtgcagagatgaaatgaaagtccatagccctaccacggtcttagcgggttctttccttctgttttaccatcattagcatatggttccctgatggttgtttcagaatagaacgatggctgctacaacaaccagccatagcatccatttcataagcagaaagaatgagcaagggagaaaatattcctactagttcagcaggccccctttagataactctcttagatgacccagacaaagacttcctcttccatcttattacccagcatgatcttctagagaggtggggaaatgtagttgtacctgccctcaacaacataaggatcctgttagtaaaaaggaagggtaatatgaatatcgggtaggcaagtggtagactctggctaccactgtgcggcattttagtgaatgaaagatgacgatgtggcatgtatattcttagaaaggccatgtaagatgatgttatctatgggtcaaatgaatttcccttcaggtgaccaaggtatttacacacattccttgcaggcattaaaaagaaaaaaggaaggagggcagggagaaagccactgccacagttgtggccgagtgaaaggtgaacacctaggtgtggtagttccagtatggcagatggaattgttcactctttcagtgcccccttgtgcccaatatactgtaacaggataatacagggaaacagtcaagaaagaaactttttgaaaactccattcattaaagctacagtatagcaatgtgtggttttagctactagaaatgcaaaaaaataaaaaatacctatacagtatataacttcatgatgctgggacaagacgtcacaatgttaaggcatatctttcttgtgctaagtagttctcttgtcaaaaaatatgttttccatttaaatttggagttgttgggcttttttcctcccttatatttatgtatggtctgattttttttttttgtattggctggttcttcattaatctaccaagctaactgtatttatatgtaaactcaagcctgatgcaagggtcttttgtttctttgttttattttatttttaaataactgtctgaaaagcagtggaatatgggttgcaaaatttaccagcagcactatcatccaacaatcagtttaaaaaggtgaagcaaaaataaggctgctcacacccctgttatgggtaggcactcattgaacattgtgtgtgccctgtagacctgcattctccagtggtcccagtccggttccacagaatcaacttttagaactgtaatcatcaatacagaccaacttactcaactccctctttcacagataaagaagctgaagtcacgaaggaaaaacaaatcctgtcacagtctcatgggacggggtaggaactagaaccaacgactcatccagagttcatattaactccgaactgttgccaccatttacagagactcataggagaagccgcttgctctacagtgtgaggattgcaagctgtgctaggattcaagctcagagtccctgagcctttgtctcctgttctttcctgtgtgcttatgtggtcagtccactttccttctccgacatgaaggcttggcccattccaagtctcctttggaagaaaatgggtaaactatgaatgccattgtttaacactgtcaattggaatattaaaatgtttctttcattagaaataaacttttgtcaatttaaacagtggaagagtaattcatcacaggggaagaggaatgagaacctttggaatttattttcaataaaagatcctgctagtagaagaaaactcctgaaaccctggttttactgatgcccattaacatgtatacttgaagcaagagtatgaagctcttaaaatctgccctttcaaaaactttaaaaagttatgtagggagttataagtacataagatgaaaatgaacaccttctcttagtaaatgtattttaggagcatagagaaattgtaaagagaaaggtgagagtaatagaacttcacctggtaattttctggggtaaaagaaaaggggataaaggtcccggggctatattactaaagaacaaatgagaaagaagggcaacacactgttaaataatgtatgcaacattctgccctgaaattcttattttgagtaagatcctttaccctccctgacaatatgatcatattgaacagttggattaaaaaaaaaattgtggttttgttcagtaaaaacctaaataccaggggagtatctgctgtctttatacccatataattaggtggaatgtggaaaaatccaatcaagctgtgtctgactgtatatctaatctgattggctttcaactggatcatagaggagataaatggcatttctacaacacagccattcagtcactttgttatgaactttttccttaccttaaattcatccataaatgccatttaaactctggtcccaaaggtagtgaggcggtgagtagaaaatagaatcttaacacccacttcctctgttcagttatgtctttgctccttcaagtatggtctgcaggctggtcatcacctgggagcttgtttgaaatgcaactctcaggccctcactctgacttgtgcaaccagaatcaacattttcaaaatatctttgggtaaactgtatgcacattaaagtttaagaagctgtcagtcatctatataacttctattcacatggaaattctgattatgaacctgctgcttaaatctaagatattcttcacatgacttatacacctattctggaaaatatctgaaagtacccgggaataaaatgcatgagactatctgtgtatatatagctttctatgtttctggttgacttttcttttttttactattttatggcaataaatattttattgaagcagcttgggtttttttttttttttttgattggttaactgacttattcatcccacaaatctttattaaacacttcatgtgccagtaaataaaaaaagatgatgaagccatgccgatctcctcaagaaaatcagactctggcaaggggagcaaaattaaggtttcaaggagctcagatattcacaacctcaagcaggtcacagacacccttgctatcatgatgaaagctaaacaaaacttttctaggaaaaagtccacaatttcaaggaattcatggtaccactggagaccctttgtagaactcctcaagtaggttttcctaatcttgtgctcaccagtcacagtgtctgggattcatgatttctttcttttttgagacagggtctctgtcgcccaggctggagtgtagtggcacaatctccactcactgtaacctccgcctcccgggtttaagtgattctcgtgcctcagcctcccaagtagctgggattacaggcgtgcaccaccgtgcccagctaaatttttatttttttattttttggtagagatgggatttcaccatgttggccaggctcatcttgaactcctgatctcaagtgatcctcccacctcagcctcccaaagtgctgggattacaggtgtgagcaactgcacccagcctatgattcttagaggtattttaaatctcctgaaattgtacataaaattccatttttatgtgctgttttctgggaggagaaaccataatttgaatctggtaccaatgaaattcactccccaaaaggagatctggcaggtgataatgattttgaaggtttacataggcttttttgctacttagaaaagtctttacatgtgtcatccttagtgactcaagagtgggttaactggagattgggcgggaagggggtagagtctaaagaaaacagaagtgaattggtttagctctccactcaaatcacctttctttacctgttgagcagacacacccttgtgtgttctgactcctaaacttagtcttctctgggcatcaccaatcgaccccatcatcccaggaggccagttgggtcctcaagaagcagcctcccaggtttcctctagaagacaagccaagtagatcctctttaaggaccttcatgaccaaggaccttcttgaaagaaaaaagaaagggagtatgaagggagagagggaaggaaggagatgcattgccatgaccttgtctttcatgatagtactaaaaaaaattgttttgaaaaagtttgctgaaaatgcagccaagatgtgggcaagccttttctttgggcagaatgaattttaaaatgatttaaagtttattttaatgaggttatttaaataaagagtcttagcttgacaaaggatgctctgttaataaagcttcagttctatttcatagtgttagtattttaaaatatagctctctgtattctttttcttgaataatcttggttgtctttacaaatactagcaattttagtgctttctttgtaatattttgtgctttaaaatatgtgtctttggtcaggcgtggtgcctcatgctgtaatcctagcactttgcgaggccaaggtgggaggatcgcctgaggccaggagttcaagattaggctgagcaacatagacagatcccatctctacaaaaaaaataaaaataaaaaattagctgggttcagtggcatatacccgtaaacctagctactcaggaggcggaggcagaaggattgtttgagcccagaagttcaaggctgcagtaagccatgattgcaccactacacttcagctggagcaacagagcaagaccctgtctcaaataaataagtaaaaatgaaatatctatttttcttttggtctttaagggtaagatacataaagcaggcaatgtgctaaaatgtacttctttttctctttaatgctaacttttgacctgtaatctcagtcacatatacagaactagatttgacaaccagggaacattctaggttagtaaaagttggcatgcaacttctttgaaactgagttacttgttagatgatgaaaacttagaaaaactctttttcttttcttttgggtagagctttttgtagattgttttacaatgtacatgatggtttcttattttttaaagctgggcttcatgtatgaattatcattttaatttatctaatagtaacaatttactctaattgaatcttttaattgagaaataccagggtattttacaggcattaattaatgcttcctacttccctgtgcggtaggtaaatgttaaccttgttttataggtggagaacttaaaggacacagttaagtgttctggggccacccagaaactcagcgggtggaaggcctagacaacccattttggttctggaccgatgctcattcccttggttctcgagctagaatccagcctttgctctgatttatgtggaataagagaacaaggaaaaaacatggagatctcttaacttttattcttttgctttataaatgaggacactgagtcagagagcagtgacgtgaattcactatccatgataaagttactcatttgtttactcattgaacaaatattcatgtagtacctgttgcatggtgtgcatgcttcttaaattctgtaaacacattgaacaaaacaagcgaagtccttgttcttaaggagcttatgtgacaatgggaggaagacaacagtcaataaacaaatagaaaaataactgatactgaatcaggttgtagtgttagtccgttttgcattgctataaaggaatacctgaggctgggagatttataatgagaagaagtttatttggctcatggttctgcaggttatacaggaagcatggtgccagcatctgcttctggtgagctcagcaaactttcagtcgtagtggaaggcaaagcaggaccagacaactcatggcaagagagggagcacaagagaggggatgaggtaccaggatgctttttagtgatcagatctcattgtaacgaacagagtgagtaaccctcgattactgtgggaggggcaccaagctacttatgagggatcttccccgataagccaaacacctcccagcaggccccacctctaactgtggggagtcacgttttcacgttaggtttagtgggaacaaatattgaaactgtatcagttgtaataagtgtttttttggaaaaaaaaaaaaaagccaaaattaaaaggctgcagaggaggtgctatgtgtgtaggggtggagctgttgctgttttatatatgatgtgcaacagaagtctcatctgtaatatcatgtttctgtagagacataacatgatgtacaagtcatgcaggtagctggagaaagtttttcaagcagaggaatcagcatgtgcaaaaggcctgaggtaggagaatacttgacttctttgaaaaacagaaaggaggctaatttatccaagagaagcaagcaggtggaagagtcataagcaatgagatcagagtaaaaaggggggcaatagtttagagaactttgtaagccattgtaaggacttcagctttaaccctgacatgtgaaatcctgagaagatcagggcagaggagtgatgtaatctgacttacattgtagagggcttaccctgactattagggggagacaagtccggggtgtgtagaggaagtgtgcaaatagggagaccagttgaatgtgcaagacactatacggaaattgaatattgatcaagactggtggtaaggaataggaaaagctgtcataaagctgaataaccaaccattgcattaaattccaacttcaaggcacaggcccttcttgtcatgccaggtagtcagtaagtttcagaaggtttaaaaatactcctcctgggtgaataatagtaaaggcatctaaattttcttcaatgagtgctctgcaaggtacagctgtcaaaagataaccaaggggcaagttgtaccttaggcatggatgccatggtcactaagatgagcagctttctaagatcctgcctctacaagtcaagaataaaaggaagtaaaggagttgctgatgggttgaatattcctgctttagcaagaacattataggctgcagtaattctgcttgttctttgtcatcaggtatttgtactaattaggaatactttcagctgtgtgtaacagaagactctgaccaatggtcttaagtgattaacatatgtaattattttacatgccaaggagtctagaggttggtggaagaggatttggtgtagtggctcaaagataaaagtcctgagctctttatattttccagtttaactattcttagtatgttggtttttcatcatcatgctgcttatttcatagtcacaagatggctgctgcagctccaggcattacttcttcatagtagagtcacattcagaaaggcagtgggaggggcaagacacactctcctcattagacttgctattttttttcccttggaagaacagcccctaacagacaacctctcacctctcactggtcagtagaggacttcaggagatttctagatccttttgctttgttgacaaagagcaaaggattaccttgcctgttatatagagcaatcatgaatcatctcctgtggctaagaggaggccacattccccaagatcaaggtctctttacctgctcttggacacatcaggattctattagcaggtatgaagtacacttgtgtttgtggtgaagggtagagggaatggggcagaaatgacaattgggtatggtagtggctgagtgaatacttttgaggggatagtttgggctcgttcttctagacttcatatttaagctgtgacctaaatctttcaaaggaaaatgaacacaatctggtttgctggaggaacagaagtatacccacagtgttggcagtgagggaacatgaggttgacagctgggcaggaaccagattaagagattggatcttattttaagtgcaatggggagccattgtaggttttaagtacaagaataatttatgttttaaaaaagatagttctggctgctgagtggttaatagatggcaaggagagaagcagaaagatggaatagaaggcaatttcaggtatccaggcaatagagggtgaagactggagctatgattctatgatagctaacttccatatttgccctcagtgattctctccttttggtatttacaccctttggaagtcttctgcattttaccagggttagtctcaatgtaaccaatagagtacagcagaagtgatggtctgctgcttctgagactaggttataaaggctatgacttccatcttggtctctctctttcttggatctcttgctctgaaagaaacaagctcctaagttttgagctaccttaaggagaggcctgtgtggcaaggatcaacagccagcaagaaatggaggcctgccaacagctacacaagtggccccagaagtagacccttttttcaatagagatgacagttggcaattggctatgattccaaaattatggggataaattaggaatggagaaatggatttaataatcactagggccaggtgtagaggctcatgcctgtaatcgtagcacttttggcatccaagtgaggcagattgcttgaggctaggagttcaaggccagcctggaaagtattgcaacaccctgtctctacaaaaaataaaaataaaaataaataggtgtggtggcaactgcttgttgtcctaattactagggaggctgaggtggaagaattgcttcagcccggaagttcggggctgcagtgagctgtgatcgcaccactacactctaccctgggctacaaagtcagactctgcttctaaaataaaaaaagagagagagagagaatatctcaaatataggtagcatttaaagctgtggaactggatgggataacctaaataaaatttattgagaagagacaagacccagggcatgaatgaatgaaatgaatgaatgaaatatgaatatctacattaaaacacaattccctttaaaaattagaacacataatgggaatacatataggtgttaagttgtccatactgggaatattcaatactggacattactactgaagaaaatttcttaaacttctttatgatgtgacatttatacactgagagtgtgtgttaaggttgctgtggggactttaactcttgaacttcctgatacttggtgtattttcattttaaaccttcctattctatcacaataaatttacaagttaaacatgtatagctatgcaccgtggctttgaatgtgtctgaatttccaaggaaacatgcactatggtattggctatttatgagtgtggagaaatctaaggaaacgtattttcatttcttattcctcagcaaattacagctcgacatgggcctttaaaaaatagacttgctttacttcaaacaacttgcttaccttgaggttttctgggaacgtagggctgtatacttctgagagctctttcataaatgatgggatgtgctgcaacctctcagctccaggcaccttgaaacaggcaggggggtttctcttttgccttccgtgtttgcttaagggaaactaaaagcaatcttctatttgaggtcaagttctattacactgaaaacatttagtcttcaacatacacgattaagatagcacatctgtagtggtcacgaggatacatgcccaacttgccccatagaaagatagtaaaggaatctcttgtgttggtggaataataggactgaaacatattgaacttcttgaagggaaagtataagtagcatcctcttcttttgctttctggacacatattttcccatctccagaaagactgagtccccagggaataaagactattgatgtggccttaagtttgcaatttgtgcttcccataaaaattcctcccccaactatgtatgtatgtcaatcatgatatgtcaccagcaggtggcaacagcgagtgcaatagaatggaaaaccccaggtcagaatctctgcagatcactaggaagggtagcatgccagtgtacacagtgtatgcagaagggaaatgactgctatttatttttttttaagtgctttaccactctgtcctacctctccaagagtccattttctttcttccacaaaaattgatttagaccagaggtcaatactcttattaatcagagggaggtccttttaatagcctgtaggtcttttcctctacatcagggacagggaggtttgcccttgtttgttaaagagttctcattttctgacttgcctgcccctatgggcctcttaaagcaactctgaaaacaagtggcaaagaataattttttactagaagacttagcaagagccaactaatttgacccattaagtgggctatcagaaagctaggaggagatgacaggggttgtttgccaatatgaaagaaagagagatatcactgttttttttttctttttttttctttgtttgtttgtttgtttgtttttttgttaagctggcagctgctgtagtcggattcactggcattgactgccacctggttggggaggagtcctatatctttgcagattccatctcagagatgagacattgtccccctgtaattgcctttgtgtaatttcaggactagcatcatgatagatactatatggcagagcaggcatgcttgggcttgtcacatgtacaatgagggactagagctgtctttcaggtccaaggagcaaggttatttgaggaaagctcagctgggagtgagtgttcttgaggaaacatctgctccatagggatgtagacccttagaagaacatcctttgcaggttgtgcatgagacaagccataaattagtaggatgagctccccctgtagtctactctgagtacagaactaccttacagacaattcagttaggcctcagacatcacagtgcaccaaggcaaataaatccacaagtgggaggatatgcttacaggcacagccttagtgggggaactgtgaaaattatcccttcatgtttctctgaaagcaagtgtatgagcattttatggaaacctagtgcctcccatcccacttggaatctgaattgcttgcagtttcctgagatgccactccagccatccatgaggcctgttctcacttcacacatactctaagacaaacgacttgtcatattattgagaagatgggaaactatttatattaccacctaaagaaagcgcattataagaaatcaggctatgactttggttttgccgatagctgacatttcaaattcgggcaagtcacaaaaatttcatttccacttacttatgttaagtagggtaatgatcccgccttggagaccctatagaatatttgatgataataataataataactaaatgattatcgcttattcatgtgctgatttccagcctgatagtcaggctcttcacccatctatttcagagaaaagccaatatcctaccaccatctccagggccctatatcatctgacccctttacttctgaccttgtttcctcctgttctccttttattcattcaaactaagaaactagctttcttgttatgtcttgaatacactagggtctttgcattgcctatgtgctcttcctggactgctcgttctccaaatatgcagacgatagaatttcttaccatctttccatctttgttcaaatgctgccttcttaattaagtctacctggcccacacattttacagttcgaacctgtccccaaccagactcctaacctcttcattttccacattcaaaagcacttacctgttaattatgattattgtttactgtctgtctcctccaattagaatataaattctttaagtactggaatttttgtttcgttggtttgttttcaatggagtatccaaataccttgaagtgcttaacatacaaagggatttgattaatatttggcaaatgaatgacaacacagccgtcctgttaggtacacacacaaaaacacacatgtatacatatattcacacactcccactctcacatacacttgtatacagaatttagatttattttataacttgatgaggttgattaataacccattctgtgctcctattacaaaagtagcacaattagaaatatttgaatatgtcttcaggtgagtctgttaattttcttttgaataattttaatcaaaaaatatgtttatattacagaagaaatacaccctccttaggcattttaagagaaaatgcagttttattgttttcagtgatgtataatataaagtaatagtaagggggctactgagacactgcagataaacaccctgctagagctagttgaatggatagataagactcatttacaattaacacactgtttgtatgcatttgggttgttgtaaatgtgtttgaaaacaatttgttctcaagtaaattgaaacaccggctacattcattcttgtttacattaattttattgatctattttctatagataatgggaaaataaactgtagcgacatagacaaagctgtgtttgaattgtcacaaattacaaatcacaaggaatcttaactgatgagtttcttccttgaaaatgtgttactccacaatgtaaacatcaggtgctttgattgcttttggcttactcatattcatgcttctttatccaggatccttccaaataaagcatccagaaaatgtttgagtcacaaaaatatgggctttgtattgtttacaaaggaatattggtggtagagaggagggatggatttcagttctacttcactcacctcacatttggtttagcgtgtcctatttttgggctatcattacatgaaggaagcctaccaacttttgccaggcactttgcatcttcccttgttttgagtgagaagctctagattcttccccatgtcttctaccacagctttaagatggctatttggctttgactgaacactccagcggagtcttatcattttcccaaacagagcattacatgattgtgtagttgtagatgttagaaagttcttcctcacatatagctaaaatttgactcttgggaggcagcctttgtagctagctgtagatctacctagtaatggaataagaggctatctacctcttccttcccccgcatgtcaagatcctttctcaagaaagctaagagtggcattgcttctcagctttttcttctccagattaataaaactatttcttaactgttttttaagaaagtgagcatttataggcacacacacacaatagtttatatccccattttttagaggttaactgctttcctagatgtgatcttgtgctttttgccgcttggaagaaatatttaattgataagagagtaaaaggaaaaataatttgctctgcagcggcttttgactggataacttctgaggaacatatattgtctgaaaaagaaggcacaaaattatttcatggtgaagtctacatagggtacactggcaataactgtttacctctttcaggccagatttagatgttcttactgacatcgttggtcctcaaaacatccctgagattgagccttacttctattattccaggaaggataataccaatatacagattgactaacaaactgtccacatattagacaaatctagccaaaaatcaagtccaactctttggtcatagatgaacacttgtgaaggagggtaagtgaaatgcacacacctacccatgaaaatggcattactagaagtaatgacaatttgaagccataatcgtgatgctttagcactttctacttgatcaaaaataaggagatgtgggccaggtatggtggcttacacctataatcccagcactttgggaggccgaggctggtggatgacttgaggccaggagttcgagaccagtctggccaacctggtgaaatcatctctactaaaaatacaaaaattacgtgggtatggcggcacgcgcctgtagttccagctactgaggtggctgaggcgcgaaaattgattgggcccaggaggtccaggctacagtgagccaagatggcgccactgcaatccagcctggggaacagagagtgactcagggaaaaaaaacgaacaaacaaaaaaccaaggagatgtggagagagtttgccatctttggcaaaaagtgaagatcactaatttggtgatcttaatttgatctctaaatgttgttttgctttgaaaaatagctgaacacatagcaatgttcagtttaaaaatcataattaatgaaattatgtatcttttctcagacccagatcacagaatcactgggaggagattaaatattgggatagagcagagtaaaaagaaccatgaaggaaaatcatctttaacttgaaactaaatttggtaacatctaatatcaaacgggattcttatagcatgtggaattgtttagtcactaccataatcatttcaaaaccagattttctgctttactgctatagtagttcttgcctagcaaatgaggagcaggtcttgagtttctggaaacattcatgctattttatagaacttctcacggacacctggagggaatgggattgtaaattaatggtttacatagctgtcacctgaattcctagaattggaacattttgacttccttgatgagctcagacttttgcttcatgtcacttatgaacatatttccaaaatttggaaaataaatgagtttagtttcaaagtttataaattttttttgtgaatttagagagagaattaaagtggtggaatacggttacaaagtaatgttattagctataattaatcagcacggacaagtattgtgtcctaggataaaattttaatttgcaaggtctcaattaagagtgaatagaagctgtcagtgaatttatatataattttgtaaattcagtagatagcaacctatgacattatgcagatgactgttttgcatatttattaacttttttcatattttccttattgggaatcaagaaatttgtgcatattaaagttacagagtgtgccacattatgacaaagactgtgacctctttaagaaatgtttcccggtcgggtgcatggctcacacctgtaatcctagcactttgggaggctgaggtgggcggatcacctgaggtcaggtgttcgagaccagcctggccaacatggcaaaaccctgtctctactaaaaatacaaaaattagccaggcgtggtggtgcatgcctgtaataccagttactcaggaggctgaggcaggagaatcactgaaacccaggaggcggaggttgtagtgagctgagattgtaccactgcactccagcctcggcgacagagtgagcctccatctgaaaaaaaaaagaaagaaagaaagaaagaaagaaagaaagaaagaaagaaagaaagaaagaaagaaagagagaaagaaagaaagaaagaaagaaaatgtttcccagtttttcatggcctctgatgatttgaacaaaggcacttgttaaatagaagatgagatacacatgacacctttgctcagaagtcctctcatctctctgtgccagacaattttaaaataagatgtgatttcttccccctattctcaaataatatatttgctattatggaaaacatgttaatttgtgaaaagtattaaaaaaaatcagcctgatcctattgcttaaaactagcaatgatagttaattaattagttactttatttacttttaagacagaatctcattgttgcccaggctggagtgcagaggtgtgatcacagctcacagcagcctcaacctcctgggctcaggtgatcctcccacctcagcctcctgagtaactgagactccaggcacatgccatcatgcctggctaattttttgtagtttttgcagagacagtgtttcaccatgttgctcaggctggtcttgaactcctgaactcaagtgctccacctgcctcagcctcccaaagtgctaggattacagggttgagttactgtggccagccaactgttaatattttaatgtttctttctcatcttatgtctaccactgcatattatagtctatattactttgtgtttgactttttacttcatattattgttttgtatattatgagctttgcatattatgagctctttctaaatatattttgtcatattctgacaggatattatcaatggataactgatagcacaaattaccaaatctttctataacaacattgtttagaaaaaacatactttagatgttttcaggaaaaacgtgaaacctaaaatgcaaagcttcattattattgatcactattacgaaaatattaggtgcctgtgaaatacttcctgactgcttgatttcccagcacactgataacggtggtctaaaactattgtttagatattgggaatagatttttgaaagctggacttcagactgggagacttactggaaaataaaaccaccaagaaaaaaactttgaaatttacgaaactttctaaagaaaagttatatattttagattttcctaagttaatgttaggcctgaaggcaagttgaaaatgataaatttttaaggaccaattttttatactatgatgttaaatgaaatagaaaatattcccaatatctgtaacacacacatacactgtagtttatagctagaaaggaaagatactattttctaaatagtctttttgtctttttgattcttctaggttcaaagttcacactacaagatgacagtcatttgcatttctctgatttaagtttttttgaaggggacggaggaaagggggagttcgtattagcacagttttttagtctattgaaacttttcaatacactgaaaatgtttgagcataatatcctcacctttcaagatatcacataactcttgcttatttaacagggaaaaaaaaccccaaaccccaaaaaaacctctaaccaaacacgaacatgacactcttagatcaaattgtgctcctggctatttctgaataagtccaagtaacacatggttagtgggatattttagttgccgagatggcattctttttgtacccagggctttgagacttttggattttcaaaattcacccttgtcaacctaaataacaaagagagagggtctctacaaaggaagacgtttatttggaaatacagcattgtaatgggaatacacatgtcatagtgaagtatatgtgtattcagggaggtaaaggctctgtttgtctgtttcttaacatttgtgattctattttgatactgacagcttttacaccctgatcatcctataccctagggtgatatcctagagcttcaaatgcacttttaaattaagcaaggtgattaaaaatgtaataacataattgagagatagataaattcttctttagatttgcagttccgaataaagacagtagttatgagttcctacttaaaaattttagggttcacattgtaaaaatcttagacctggaaggcttatcgctgtcttgtcccaaccaatctttattttcctaaagagtaaaatctccatatgttccagtttgcctaggatagtcccaatttacgcctattgtccatgtgtaattataacagcaccttttattactatcaagagtttctagcttaaaggattggttatataatcatcttactaatgagagaaccaaaccccaacccttgaaggggttgcacaagcgtatgaactagaccaaactagtttatggtgaagtggagatgcactctctaaacttccaaaccagagtttaatttattattaacattcacgatttaagatgaattggatgaatgcaaagctcgtaagatttttgaccaaacaatgtaggtaccagtggttctcaattttcagctggcatttgaatcacctggaggccttgttaaaacagattcctgggccccaacccagagtttcttaatttgaagatctagggtgggactgagaatttgcatatctaacaagctcccagagatgctgacgtggcttctacagggagctctcactttgagaacctctgtcacagaatgttaaggcaacctttccgtgctgtaaaggcagacagaggtgagagcatgcccttccgcagctgtaaatgttcgcctcttcttctcaatatataacttatttgatatgcaccagaattttctcacagcaaaaactagaggtgtgaagtgaaaaatttgaaatgcaaaattcacagaaaaaggtagggttatgcggggttgggttggttttttttattagggggtgcagggccattctttgtggacaacacagggaggctacaaaaccaaaaggaagaaatagcttttacgtgatgatctagaaatttgctactcaaaatatatgagccatcagcatcatctggtgattgctagaaataccgagatgggagacacaaggcttctgtgacaatttcttaaatagatcatggttaatttgctgccgtgaatgtggaaggaactgagttactgagttagagagaagacttaaggattaccttgatatggaggaagcattaagagagactgaactgcaaaaattctttcccactgagatactagttcagagattctctgctttcaaaccactatagaagtgagattaaagtttaccatgaattgatctgaaatcgttctgtgttctaaatgcttaataaaatcctgaaccagaaatctgggtatggaaaacaaaattttcttcttttttctcccctttctttcatttggagaaataagtagctggaatagtagcttaagaaaaaccagcatcactgcaagaaaatggaggcagatgagtttagaatcacaaggaaagcaccaggtagttcagggaaaagtttgttgcaacaaatgtttaagcctgggttagggattgtagttggttagaacgaagttatatattgacaagcagtactgaaatcagattcaccagaaggttctaaaagcagagttaataaggagaatttccagtagtgttattgaaactacttggaattttctaagaacagttaggtctgaaagagaagaccacggcagtaaattctcattccctgcttttctttaaggacaacaacaaaatgggaagactattttcctgtcaaatacacattaaaaacagaatttcatgtgagtcaaatagaattacctttgcaactgtagcaatggtgagtcaccatgtaaaattacttgtcaactctcaaaactctgtggttgctatgaatgacatagcctttcctggagacagtctcgaagatattcagcccacagagcaccattttccctccgccactattcctttgtgcacctgcagttttgagtcaacaaaaattgccaacccagggtgataagctccatataaataattaatgacatggaactaattactcctgtattaggccacctgcaccctcaaagctcaagagccccaggtgtgaaaattgcaggggcaactaatggtgagctgcatttcatcacgtaagccctgtagaggaggccctggctgtttcctgctcacgcttttttcagggttcagtaagcagagcccgggtgggactgactgcttttgtaacatctcagaaggcaaccagacgatgtggtgacgcttgaaaatcgagctcttacaggccaccaggaggtaagagggattaggtttaattagaggaaaatacaccttgaaggatatggttggaaattgtcccttgaggtatgcgaaacctgctccaacaactctatgtgagcgtgctacatttaagagttatgggacttccgtttcattatttaagcagattcccaggatttcaggatttcaatcttcaaatatgtgaattaaattatatacgtatctatacatctgaaatgtatattataacacaacattataacatttatattactactttttggtggggatctttattttcctggcttggtggtgtgtgtgtgtgattgattgatttgttggttgattgattgatatagactctttccaagtgagatcttaaaatcttcttggaaggaaatctactgcaaagtagtctacagtttatgatgacttaaacaccagtagaaattctcaggccatcttgtagaacatcattattagttttgcattggctttggaatgaagaagaaaaggagaaaatatgattgaagttactacctctaggaacttcaagttccttgatttcgctgagtgcaaagctcagtatgggagatccaacttctcatttagtgacagcctcttatcagttattattcttttgttatggtttgacggtgagttggggaaaacaacaattggatactcaatagcacatttacaaaatgctagaattaaagattctaaaagtccgtggggaaaattccaggagaatttgtctaactatatgtttttctaaaacacacatactggtttacactaattagcccacagaatacctatttctattgttttcatcttgcgagttggaaagtttaggaaaaaactttttttgctttcaccctcttctgttcccttagccccacaattaagcttaaattacatttttctatactcatcatattaaaatttatatccaaatatatatagtagtctctaataattttgtttaattaatagactttgtttttggagcagttttaggtttacagagaagtagagtggaaagtagagttcccatatatccctcttaccacctgctccccagtttcccttattattaacgtcttgcatcagtatgggacatttgttatggccaatgagccagtagagccagtatagatacattattattaactaaagtccacagtttacattagggttcattctgtgtgtcacatattttatggggtttgacgaatgtataatgacatgtatataccaatacattactgtacagaatagtctcactgcccccaaaattctacccccccctttttttttaacaaaaatgagatatttattacactttgatttttctttcaatttcttcaagtcaactgactgggttgatctaccccattccttttaacagctgtgtaatagtacatggtgcaatgatgccatagttgatttaacatttcctcttgtggattagaattcatattatatccttgtgcagattatgcttttacactcacagaatttgactcccaggagaagggctgcagaatcaacggctatgtgcactattacttttaatgagtattgccatgttgcttttaaataaagctgcattaagtgacatttccacctgtgatatgaaagtacgtttttgccccagtcctcaccaggagcaggtattatacacccacagttgaaaacatctggtaatttttatttgagaaggatgaataacacagtagttgtatatgttggctctgaattgtgattgggctagagctctagcactaccactttctgctcagcaaccttgggcaattcatttcacttccagtacctcagtttcctcatctgtaatatatggatataataatcctattacatcatagggttgattgggtgattagacaggataatacatagaacaggctgatcctgtacctggcttagactaagtattcagttaatgatagcttttattactagaatattatggatggatcatgagatccttcgaacaatatccagaaatattgcttcattataatattcttggataaattgtggaattctactaaattttggggtaattaggtgagatcaaagcagatacaaacattcccttaatgtcaaaccacagaatgtagtatccaaaaacagaagcctacctctgatcatcatccctctgtaaatgtacaaaaataattaactaaaattcaggttattagagaatctcactttgtataagcacaaaccttttgtcagagttgaagctaacatcttggcatactaaatttattcaggtgttatttcttccctccttatatttaaaaacaaagtcaaagctgttactatcaaattattaagtggccaatttctctttagctcttattttaaattctttgtcaaggtagtctctgtagactgtacctcagggcacattatagcattccctgattcttcaggactaagactgtctcctccaactttccccatatatcatgctatttctgttcttcacctgtaacctctgaggatggaccaaaagttattccttaaattccttagcaggagctgagcgcatccttgagagaaagagagatgagagagagagagagagagaagggagggagggagagagagaagggagggagagagagagaggagggagagagagagaggagggagagagagagagaggagggagagagagaggaagaatagagggctggaggcagagagatttggaggagggatgggtgcctggtctctaccttaaaaatgcaatcattatcctccctgagcccctgcgtggatggcacttccaaccatgtgaaatgccctctccttcctatgggaattttgtgatagtttaggaaattgtgaatggtctgacaacatggctccctgttgcatactgggcaacatctagttatgacagaaagctggttatattagataaaggcagtaaagaatcttgagaacttttgcttgtttgtctgggggcttttgtgctatcctgaagcaggaactgtggagtacgaactgtatgatgtcctagtagacatgccctgctatgctggcccttctttctgatccaagagtcagggaatattgtctaacaggaattttcagcagttgctgtaatgccaaacattgaaaatttcaagacctttttactctttctatgggatttgtggaaaggagtattcaaaattgttattgacttaaaaaatcaaaagtgtagctcatgaacactaaacttgaaattactgtagttgtgtattttaaaaataaattgcaaccaatttttatgactccataccaaacagcaatttatcttagatgttttaaattatttattcagtaacactctctgaatgccatgctacatagagaatgaatggaaaatgtcagaagacctgctctaacttccctttaggattgccatgggaaacggaaaacacttacctgtaatttcaatatatatgaagctctgagcatgtaagcatgaccctaagcgagtgtgagaggaagaaggaataacagaaagaagcagtgacatgtagctgagagtgggaggaatgttctagagagcatgaatagattgaattggaccccagatgttatggggccagtcttaatttcaaatattccctcttgctctttaattaaacacatttgtgaatcaattaaaaaaaaccaacaacaaccttgtcgggccatgaatttctaatctgggttcacaaacatgttcagccaaattaaaaaaaaaaaaaaagtggtgggcacagtaactcttgaatggtggtggaactataatatggaaggtcctgaacaacagcttttttaaaaaaagaacccccattctggagtccacaggtaatacaatgttttgagtaggcatagttgtagaattgccagagatgagaggatctctaagacagtccgtggaaaaatgacttgccaacatttatgtagaagaggcaatgaactgggaggacccagagaggagcctgaattttaacttgttgtgggccgattgaaaaataatataataattaaatgcttgacctgcagaatgcatgatgtagtttaactctcatttcccccacttcctaagagtgcaactttaggagagtttccttatctttaaaatagaaatcctgttaatacccagattatagaattgcctaaaataatctgtgcgacataaattttagttatttataccatgaagacaatatttcaggaaagaaagcctaaacattctcacttgactgcccgtctatcttccctttgtcagactcaatacatcaggggtagaaatcaaaattagcatgaaggactgagcaggattttgcccccttttcccattccctccagaatgccattgatgatttatggaagttctagtagtgaaagattggagagaaaaaaaaaggaaaaatgggaatgataaggtgagatatcctgaaccaaggcaaaaaattattacaaggaaaagaaagtgtaataggggatgggaagctggcagaaggacactggatcgtgtgttttcactacaccacttattttggaaaagatgtggaaaattgcagagttcaaaaattactgtcccagctatgattcactaaagaagtcactcttggccacatagaccctggctttttttcagaggtcatgtttacacataatttataaagttctaacatgccgttgaaagtttctctggcatatttagaaatgtctggaagagcagttctcaccatttcgctctgcctgcctttgatttctgcctatgttttaattcaataagtgtttattgtgcttagggcaaagaagggctccagttttgtgtgctgtgaactgcaaagctggagccctctggagaattcagttcctgccatgtctgccacctgattctcacctggcaagttttatttttaattttttgagacaaggtcttgctctgttgcccaggttggagtgaagtggtgcaatctcagctcactgcaacctctcctgtgctcaagctatcctcccacctcagcctcccaagtagctgctcaccttggcctcctaaagtgatgggattacagatgtgagccactgcatccagccctggtaagtcttcaataatgaagaaatgtctgtgctgtggactctggatgtctgagcattgcttatccagcccttcacattggtcctcttcattttctgggtcataaatggggagaagattttacagatgctttgaaggaaggtcagcaggtctggtgtatgatgaaatcccatcccgccgctcttcttctcttgtgatttgataccatggaaggaagatgccttctgcaaaggcacctgtctcatttctaggcagttctagttgctaacaggctcttccttaaaatctgggtctaatatttgcttattgctgctggatctcattagaataatttgatttctttttttttgcataaagagagattaatttggagtttccatttctctccttggttgtttcttcctccttctaaacctacccaattccttcaacagtttctcgcaagacaacgtcaacactgtttcctcttttcaatatttgaacattgtcctgtcatcaataaatagtatagtattataactaaaggaatatatatttacacatatatatacacacacacatatatatatacacacacttatgtgtatatgtataattctttttttaaaagagacagacagggctggtctcaagctcctgccctcaagcaatcctcccccttggcctcccaaaatgctgaaattagaggtgtgagccactatgcctacccaggatgatcttgataggtaaactagactttcacatacatgagcatgcactttcaaaaactagtttctttctgaaagtctgttgacttgcagaggtgataatttcaattgtctgatcaattttcttatttttgagacagagtgtcactctatcgcccaggctggagtgcaatggagcgatctcgctcactgcaacctccgcctcttgggttcaggcaattctcctgcctcagccacccaagtagctgggattacaggtgaccgtcaccatgctcagctaatttttgtatttttagtagagacggggtttcaccatgttggccagggtggtctcgaattcctgacctcaggtgttcggcccgcctcagcctcccaaagtgctgggattacagacatgagccaccgcgcctgactgtctgatcaattttctaaggaaaatcccatgggcctgatttagagtttgccattctgctttccaaagaggtttctgatgaccaatgcaatttgaatatgcattagattttttcaaaaaggagtttctggctttggggaaaattatttaatattattagtttctttgtatcaatatcaaagtgggctcctttattcgtttattcattcacctgttcatcaaatgtttaccgagtgactgacacatactaggctagaaactgtaaaatgtgaataatgctcctgctagtcaccaaaagctcccctggcctcagttggctctgtcctttcatggataaagctccttctgctgttcaagctgctttcatctgtgctatggcatttgaaccacctgacactggaatctgcaggagcagaagggctgaagttctcacctgagaactgagttaactgaaacccagagtgttaaaggcatttgacctttgtcccatcctatccaccagaccctgcaagcaaagaaatgtaaagtcaccaaagccagtttggcattgagcaaaacagtccatactttgaaaccaaaagtaatgtgagaaggtttaaaacttacaaatgagttattttttatatttttgagtggagtatgttactctccatacatcccagagactacttctggtgttcactgaataggagcaactcttggggaaatatttagaggttgttattatatgtcctgatacctctgagatagtagcatattttgtgtgtgtgtgatttggcaacaaatgtatctataggacatttttctagccacttcaactttgggaacaaagacaaagacctgagagactcaaaaattcattgagcagctaattggacattacaaatcctatgactaaattttagagaggattctgcaaatgcaagaaatagcaaaatgtggtttacacattatccttaagatggcagggaagaatttaataaattttaaaagatggttaacagatatacattttaatggcattaaaaagtggaaatcttcacttatgtataaaaattactaaggcagaaggattttggatacattagctgttacaatgatctatttagtggaacacaaaggaagctagaattgaaattgaagcgttggaaggagagagatagcagttgatactggtccagaaggagttttgtttttttgttattttaagtgatgttgctaagtaaaaggatttttgaactacaagacttgaggcttctccctaccctttgaagctgtgatttttgcctgtggctatgccatcttttacctgaatttcatcactatccttccactccatcattaagcacattacttggcagataggtaaactattttcaaacaaatgccactaaaatgcaaatgagattcctaaacatcactaactttacatgacattgcatataataaaattttagaactgtaaaataataaacccgagagctattgtataagagaatttggactgtgttcaagttatctgaagcccaatactgttatccacctgggctgagcctgacttcccaagagctttggcactgacgtagggggtcttgagctaattagtcaattcttgccagaggccagggattaaatcatgtttcctggaaactgtataaatctatagatctgtttccaaaggcttgtacttctcaatagtgtcaccaatttgcaaagtggcaaggtattttttttcagcttgagtataaagggagaaaaagcatatggttggattgatctggagtttggaggtgcagtaaaaggacagacaataagaagttaataggtaagttggaagtggaaaaaaatattgagtgagggagtgaaagactgaggaagatggaagaatgtgctcagagagaagggtatttggaaataaaaatgtggaagtggaacaatgctgaaatttgatatggctacagaagtagattagcaaaaggcagtagaagttttagtcattggatctagggagacagagaatcataggtacctgataatgactgtgttgtctacttggatgttgtcaattggtaagaggtatgggatctaagaagacggtgatccaatttccaaagtcttcagtgaatgagggaaatattctaggaaccagtaggtgccaaccctgcagagggacagggaatgatggcattaagtgccatgaggctttgtggaaaggaggttttgcaggaggttgtaaggcagtgaggagaaaggagaatggctgaactggtccatgagtggtgggagattgaacagtctgcccttaggaaagggtaaaggagtgaacttgaaaagggcaagtttacttgagttgggaggtggtgggtgtagaatacatctgacctccagttctccagtttctttttctttttctttttttaaattatactttaagttctaggatacatgtgcagaacatgcaggtttattacacaggtagacatgtgccatggcagtttgctgcacccatcaacccgtcatctacattaggtatttctcctaatgctatccctcccctagtcccccaccccctgacaggcccctggtgtatgatattcccctccctgtgtccatgtgttctcattgttatgagtgacaacatgtggtgtttgattttctgttcctgtgttagtttgctgagaatgatggtttccagcttcatccatgtccctgcaaaggacatgaactcatcgttttttatggctgcatagtattccatggtgtatatgtgccacattttctttatccagcctatcactgatgggcatttgggttggttccaagtctttgctattgtaaacagtgctgcaataaacatacgtgtgcatgtgtctttatagtagaatgatttataatcttttgtgtatatacccagtaatgggatggctgggtcaaatgggatttctggttctagattcttgaggaatctcccacactgtcttccacagtggttgaactaatttacactcccaccaacatgtaaaagccttcctatttctccacatcctttccagcatctgttgtttcctgactttttaataatcgccattctaactggcgtgagatggtatctcattgtgggtttgatttgcatttctctgatgaccagtgatgatgagctttttttcatatatttgttgaccacataaattcagtttctttaatccataagcaatgtaggatctgttttcgaagtttcgacttctcaacatcatctacagcagagtagccagtgctacaccctgcaaataaagagatctggttacttggttttaacaccttgtttgaaaatcagcagcctgaatcggcaagcctcatccttccccatcatgtcccacagctgtgaattccccagttaattatatgttgggtaatgaggacttgcttttatctgtactaaattttagttttaagccctattaatgggctttcattttggcacttgtgggaaaggggcagtgaagaggcctattaaattttctcttgggtttttatatccttccttccaaagaggaataataaaaatttccttccttacttctcttgtaacattctttttgttttaacccagatgcctttccaccatttctgtattccaagtatgccacttattagttcttgagcttctctgtgcctcagttttcttgtttataaagtaatgacaataatgtgatttacctcagagggttgtttgagatacaagtgaggtatttgcaaaaggaataataagaatggcaatagtaaagccccattaaattgtttgttaaataaaaatacttttataaaaagtattggttttagttaacacccatagcttttggttaaaagtatttggtccttgttttggttaaaaacaaagcaacaaaaccttgctgggaacttggccatagcagtataaagctattgtctagcgttgtcctcttaaaaatgaaatgcttcttcttggggctccccattgtggttctgcagactcgaatatctccagtgaaatcttgtgaacaaatacatcctcagtatcaccctcataacttcctctgccactatcaccccaggccacttctctctatgatgtctcacacttattccagccaaagattaggaatttcaatcaaagtcttagtagtggattaggaagccttctgctttggtgtgctgtaccaaagcctctcaaggctggtagttgggccattaaagggccttcgctgaacttaattgtcaacccacttcctaaccaaacctctaactcaattagcacttatttgactgtctaaatctttggcttgaagcaccctgccagtttgggtgggagcttttggtatgaaagacacccttttcctgggaactcagcctggacaaaccaattcatttcacactcctttccagccgcctacaaatgggaagcaaatcttcatcccagtttgtgttctgggattgcagccagcaagctgatatatcccatcagcccatctcttaagttacctggtcttttcaaatgtataatgacttttgagtaacacttttgctttgaataaccaattcattgagagacttcccttgctctctggcagcacctttgaggggagtgacattttttgaagatgatgtttgtgtccctcttaagacccttttataacttgagcgttgaagattgttgagcaaacaagtacagccttgggttttgtactaacgttttatgactggtgaattcagtgaccttctcgttaggctttgatcttaattattttaaatatcatagggtctgattcacaaggcagtaacggcaggtcattattcctggcatgattagtctaggttagaaattagctttgaggccccccggcactatgctctaatactttctgaaatggaacacctgtgtaatggctgcacaatcatttggttaaatcagtctctaatttaatgagctctgacttcacatttttgttgtgatttttaagagttaaatatgcatgcatagctttacatttgccatgtcgtatgattttcttgtatattgttgtatgctcacctagtgtaccttattgctactaatttgtgtaagaaacttttacatagataagcacctgtacattgaagaatcagtctttaagataaacaaaatagaaatgcatagtaatctatctgtacatcaacttgctggctagaatgtaaagagcagcagaagaacacactcatgattcatcctcagaaatcttggatgaagtcacagtgaatatgaggctttagcatctactccagaggttcaaaatttgacatggccaactgacgtttagtaggtttctgtttcatattttgatttctgaactgtttgcatcacctgggagcttagaaatgcataatctcaggcttaaccagaatctgccttttaacactatcctcaggtgatttgtaggtaaagtgaagtttgagaaacactaattagctcatgttctttaagctgatattgaattctgcccccattgttagtatgaaagggcaaaattcctagaaagatcaaatcaagcaatactaagaaaagctaatataatttgtatttctgacaatatcagacaatcctgactccaaccgtttctcaccaaggccaccctagcatacttttttttttttttcttgagacgaagtcttgctctgtcacccaggctggagtgcagcggcgtgatcttggctcactgcaacctctgcctccagggttcaagcaattctcctgcctcagcctcccaagtagctgggactacaggcgtacgccaccacgcccagctaattttttgattagtagagatggggtttcatggtgttgcccaggctggtcacaaactcctgagctcaagcaatctgcctgccttggcttcccaaagtgctgggattacaggtgtgagccactgtgcccagcccttaccatccttttctaagccctcgtcaagtcttgcctgaattattgcagaagcctgctaagttgttgtcttgtttttaccttactactcactactcatctctctctctgcttaacaccttttgttggctccccatgttactcaaagtaaaataaaaaataatccattacacatagatatggtctacccaagaatttaaagctaatgagcactcttagaattatgtgaattcttcctggagtggggtggatattggccatcaaccagatatccatttccctaatcatattttaatacagagttacttttcattttcccaaatctttgaaactactggggttgatgttactgaacttaccttgctagataaggtaaggggttgctactggctgcttactcctccttgcttagaattctaggaaatcaggattgtgggagggagggaagcatgctgaaatagtgtgttggaggtgtggtgcctataatttggctgctgctggaacaactattttgggtaatctcctgttacgctgatacagttgcactcgttgtcctatcctctcgctacctttgtctccttcctgcttgctatatagtttttctttcttcacattttcgatctactttctttttcttctttattttctttcatgccttcatgtgtccttgagaactgaagcatattttgaattgctgactatattcaaatgtcttttatattcccttttctgattttaaagaaaatttgaattattatttatatttctttaagtatatcctctagcctaaaaaatgaagtgttttagccaggcatggtggcacatgtctgtgatcccagcacttgtggaggatgaggtggatggatcacctgaggtcaggagttcaagaccaggctggccaacatagtaaaaccccatctctactaaaaatacaaaaattagccaggtgtggtggtgcatgcctgtaatcccacctacttggagactgaggcaggagaatcgcttgaacccagaaggcagaggttgcagtgagctgagattgtgccagtgcactccagcctgggagaaagagctagacaaaaaaaaaaaaaaaaaaaaaaatcaagtatttttctttagcaagttaatggatctaaaaagacaaaaactcccatctcggccctgaatattcaactgcatttgagcaaatactatgcaattagttcactcatggggatgttaccggaaaggaatctcgatcctgaacccaagagagggttcttggatctcacacaagggagaatttggagggagtccatacagtaaagtgaaagcaagtttattaagaaagtaaaggaataaagaatggctactccataggcagagcagcagcatgggctgctggttggccatttttatggttatttctttattatatgctaaacaaggggtggattattcatgagttttccaggaaaggggtggtcaatttccagaactgagggttccttccctttttagatcatatagggtatcttcctgacgttgccatggcgtttgtaaactgtcatggtgctgtgtgaatgtcttttagcatgctaatgcattataattagtgtatcatgagcagtgaggatgaacagaggtcacgttccttgccatcttggttttggcgggaattggctggcttctttatggcacactgttacatcagcaaggtctatgtgacccgtatcttgtgctgaccacctatctcaccttgtgactaagagtgccttaacctcctgggagtgcagcccagtaggtctcagctttattttacccagctcctattcaagatggagtcgctctggtttaaatgcctctgagagggacacctgtctgtgaccagtaagtaacattctgtgagtccaagtttttgctttggtttgagcaaactcaatcaagaatcatttgagtactgagtagattatatattgtaatgttatagatggcagcaacaatatcttccatcccacagtctagaatcttgacactccattattgccattaagaggtgaagtatgtgtcctctttccttgaaactggatgggcccttataactgtatcaatgactaaagtaaaatgaaagcaaacactgtgtgacttctgaggctagctcataagaatgtcatgtgcttcagaacatctgggatgttcaccaggcagcccatggtgaggctacgttgaggggaatcatatcccccagctcacagccccagctaagctccctgccatccagcacaatcttgagccaggcctgcatcagccatctccaaactggtacctccagcccctagttaaaccacatggagcagagatgagcagtccctgacaaaccaaaactacatattcctgtgcaaaatatacaattgttttaagctaccaaattttaggatgattaatcacgcaggaagagatctaatacaaatttatataaattaatattttatttttgaatttatccaaagaggttgaaaaccattaaagatcaaatattgcaaatcacttattttaaaatgggagccacccacaaggaatagaccctgtctcacttttttctgaagcatttacattgccccagggtcataatttaaatgcaaactccttggaactctgtccaggattagcttaattttctaacaacctatcacatgagtataaataatgtgctattattctcagacctatctcaggctcctagaaacaatagtgaaggcctttgagatgcttcacatcaggaatgaaagtggcaagtgtgaattccaagctcagtcaccaccatcatctgggcagcgttagctttctgaaggccaggcagtgccttaaataagacatgatctaaaaggtagtggatctgtttccttccaacttttcttttagttatgggggtacacgtaaaggtttcttccatgggtaaattgtgtgtttcctggatttgatgtacaaattattttgttacccaaatagtgagcatagtacctgataggtaatttttcaatgttcgcctcatcccacctttcattctcaagtaggccccagtatttattgttcccttctttgtgtccatgtgtactcagtgtttagctcccacgtatacatgagaacatatggtatttagttttctaatttgcttaggtaatgatctccagctacatccatgttgctgcaaaggacatgattttgttcttttttatacctgcatagcattccgtggtatatgtgtaccacatcatctttacccaatccaccaggataggcatctatctaggctgattctatgtctttgctattgtgaatagtgctgcattgaacatacacataaggcagtgagtcttcggtgagaaataagactgagactaacaggacttaacagttctccaggactgacccccaaaaaacttggatggcaactaagtggagagaaggattgtacattaagaaccatctcaacggacctcagtagcccaggaattcagcctgttaggtgtgtgcctagtgttagaaacttaggggcaaaagtggtgttcaatgccaggcaactgcttgcaaagctcatccatgtggaggtaatgtcttacctggtatttatgatccagcctctctgagagagacaggctagtcagcatcaggcagcctgtctgagctgtggttcagaaaaggacttccaactcagaggggaactggatcatcagccagtaaggaaattgaaacaggctttcccaggggagagaaaggggctaaaatttgtgctgttgttgtcggtctatttattgcatatcattctgaacatttcttaagtctaaaaaggaaactggaaaagaattatcagtctgtaatatagtcaactgtttcttaagatgtttgccttgcttgtgatatttttcttaatgctttacaggtttcttttctttttctttttttttttttttttttttttgagacaaagtctcgctctgtcacccaggctggagtgcagcggcaccatcttggctcactgcaacctccgcctcccaggttgaagcaattctcctgcctcagcctctcgagtagctgggattacaggcacttgccaccatgcccggctaatttttgcatttttggtagagacagagtttcaccatgttggccaggctggtctcgaactcctgacctcaagtgatctgcctgcctcggcctcccaaaatgctgggattataggtgtgagccaccgtgcctggcctgctctactgtttttaacacaagctctcaattactaatttatttgtcccttgcaaatttcaaagacccgtttttataatagattctcaacattagagaggtcatcccttggataaatggattcttctgccaatttgcagaagtggtggtgaagaagcaggcaggaggcagatgagttgcaaagaggattacgtggcaattctacagtaggaagaggcttagggaagtgtcctgtaaacacgagaaaaatgctgaaacatcctagagaacagtgtggggcagtttagtcctcatgtagaagaaaaaaatggaaaaaaaaattcatgtatgtgtctgtttgattccctattatatctctggcaattagggcaacacctggtatgtagtaagcactcaaaaatatttagagaagaaatgaccacacacaaaccctacagcttccccagcacatctctggaataaatccaggctattggccctgagttttcaggtcttgtaaccatcttccaaagtctctcttgcctctttctttaaaattattagtggctgtagaaaagtaagaaaactcttctttagaaatccttgtaaatattagggaaaaatacatttttttgaccatcctctaattaattgattggatctttcaaatgcattgggatagagactatgaattctaaggcataaaagtcaatttccccagctccctggacttaccataagccccttttatttcctgcttgaagttatataggttagaatcaagtactataagtttgggatccttagccttctgctgaggaggcttcttcctcttttttttaaatgtccaaagtgtggagacctgcccaccccccttaaataaagaaaaacagaagttaattcaccagagagatctatagacatggccaggttacagtttcccggggggcaaggaaacttgactctctttttaataagcagatgcttgaccttggtgacatccacttaccacttttactttctcatttgaggccttgagagataggtttcctctcttctctaacagacatattatgaaattccaagcatacacaatttctcaggacaaagagcaaggtataaaaatgagcagagtatcttgtgcttcaggttgtttcttaggttttagtatttctatatcatcttcttgaatgaaatgatcctagccttatgctccgtattccaggagtaagagtgtctgtttatcaagctattttttttcccagttccagggtgattccaatgtgtaagcattgatttttgtgccttatgccaccttccctctgaggaccttggatttcagctgcagcacatccaacatggttactcagggggtccccacaagatggaacccagtcgtgtacagtgtgaatagatcaactcatcttttaactggatttccctcatttcccatctcattctcctggcatcattcctggaatcaccttttaaatgagctgcctgcacccaagtccttaatcaggctttacttttgggagaaaccaaactaagaaaaactgtcatatgcaaaagcacagacagtattgcaactttcatatgaaccacataggcaatggtgtgctggttatccaggtctcccaaagaaaaactcctaatttgtagtgttggctgatttctgtggcataaatacttccaccatggctattttcagctgccaataggatattgctgaactcagagtgggaagaaatgtacaccatcagctctccaaactcacgctggctccagtgcacccctgctagaacccaggccaagacaattgtcataactgaccatcaggaaatatcaattaagagtgtggatattattaacgttctgttagataccctaacacattatactgcatatcgattttttcttttcttttttcttttttgagacgggttctcgttctgtcgcccaggctggagtacggtggcatgaccgtggctcactgcagtctcaacctcccaggcccaagagatccttccaccttagtcgcctgcgtagcagggactacaggcacacactaccatgcctttggaaagatgaggtctcactatgttgcctaggctgatctcaaactcctaggctccagctaccttcctgcctcagccttgcaaattgttgggattacaggcattagccaccaagcctggcactttatttcttttaagcatttaaataatacatgttttataaagatacctatattcagaatgtaaatgactgagatttgggactgcctttatctaattatgttgtattaaaaagacagccagttgtcatctctccacagggtaataggtgatacactctgggataattcgaggagagtttagtaaaagagctatttacaaagaggtggcagagtgtagaaaaagcgagatttgtgacataccactgagtccctgttattaatctagaagggaatgaggaaggtatagccatcagacccaaggacagaaagggatgtatggaaaaggccacctggcagaagtcgaaagtttgcaaaagacaaaaccagtccacagtaatgtctccagaggctacagggaggaattattccagcaatactcttctccttccttccagtctcctactcaggcaacccattggcaaaaccctccctgctcttacgaagcttactgtctggttctagtagaatctgcacactcatttgggccccagaaaaatcactataatggcacaagaacgtgttttcacaaaatgtactaattgaggccataagaattcggttacaataaagttaggttgcaatatgaaatagtaacagcactttggctgttaggaatgatcatgggaagtggaatcaaatgcaatgctaatctgcttactggaaagctgtgcgttaactaatgaaagtaccataatcgaagttggaagaactggttcaacttgtgaaaggcggaaagttacaaggcaagtgtgccagggaaattctgaaggaaatccaagagaaaggtgtctagacaatattaaggagtggctggacaacactgtcagctggtgacacataactatctttaaagttagtggctcaaaatggttgccatagatacccctggaatgaaacaatagggtttctagcaatgctttttttccaacatattaaaatgcttgaaggaaatctccttatttttatttttaattcttgactactgacctgttcacgtggaaaagcgtaggttttagaatacgatcctggaactagtattctatcctggcctagatttggacctcattttcctttctgatctttggtcaataggttccagagaaactataaaatatgaacttggatgttgatttccagccttggtttccattagtgagaatctgggaatagaataaggtgaaggaaaggttgctttaagtaagaacttttagaaagatgtcaattaaatgaaatggtgtcggtgattcttaacttgcagtcactggattcctggcagctgaaatttctatctgaattttggtcagtgttgcttatagggcttatgatagcctgcagcttgtatggtgtatgccaatctgttcccttctttccacagacctgggaccacagcttcggcatgaaattttttgggggtatgctcagaatgtggtttgtaagctcatctttattacaaagaggtagggagagaatgatgtactggacacaaaagcaagagagtttatcaggatgcattttgcttataaataagagatgaccaattcaagctggcttaaacaatatggggttgtgtcagttttcacatctggaaggtttataagcttcaagcttggtttgttcagggttcaggattctcttctcagtctctcagttcagccctgttttgtgtgcttttgtgttcatggcaccaaatccacaccctgcatcactcagagaatgagtccccgttccagaatcctcagggaatccccagaagtcactctggccatattgacttcagccacacattcatgcttgcatcaatcctggtcagagcaatagagagacagtatcttctttacccccagagtctgcacttccaggcacttccacgggaagggaggtgtggaatgaatgcaagacagatctccctggaacccgctgcaaaaaatgagtgtgggatggaaaaagagagcaccaaaggacagtgtgacaataaaaagtctaattttattctgcagctagttcaggcaataccaaaagtggatctgaggtggtataattgaattaagtcaaagtggttctatcaaacaataagatgtttgtgccatcagctatagactgtgagttcttggatgtggcagtttatttttctgagtctcagttttttcagttgtaagataataattactgttgtgtagggttttattgatgattaataaatatagtgttttataaagtccctactgtaatatctggcaaaaaaaaaaataggcacaaagtgaatggtagaattaatcatcaaaatgacaatttattgctatcatttttagtacattttgggtactcccaaagtgctagttactatattttagagttgttttgataaatataaaagatagtgtctctaaacaatgtagaataagtgggtagaaaattaatgttagaattaataacaatatattctatttaatattacataacatgtagttagtatttatgcataataatttattgttaatttcacattttatataattccaaggtgctaatttgaagaacaatgcttccctaaatatttaaatttaatgatggtagcttataaggtttgtcttcttactatgtggttctatatcacagtcattgcaaaaggacaataaattaacagtgctttagtgatggttataattcactattactacttgtcaatagttattaataaaaggttaactcttcatatgtgttcatttgtttacagtgctgtatacttcctgccttttgatactaaacaccttgtgaatacaatgatctaacttttgggaaagcaaagtacagatggccataactggattctggggatggggtctacccctggcaatgccttgcctgcttgtactttcagttatgttctaaagggcttatcttcagcaatcttattcctataagctgcttttaaaaacttagagatgtcaggcagtgggtcagatgagagctgtgcagcatggcagtatttagagtatttctgttttgaattgttttgtaccactcaaaacttcaatatatttctcacatcatagccttccacagtcacatatgcaaattcatattcataatcaaacttgtggattattcatctctgacactattattaattcctatggcattcttatttttagttccaagtgttctcttacttaaaagcctttgttgtcatcaattgttaattttagcattataatccgtgtgattgtttctctagtatttcctaagcattttttctgggttcttgttcacctttcaacccttttaatacatcccagaacacttaaacttttgcttaagtctcaaaagcacatacaattatttgaccaaataagtacatgattagaaattcataggtctcttaaaaatattttatgtcctatattaaatgtcaaataagagatagaagtttgtgattagataatattagaaacttggacttacttttataagttaagtaaactaatgttcagatgcatacaattcttactaaatacccctacctgtaacttttaagcattgccatttatcaattaacagttattttattaagcaatcattgtatgcctggatattcgtttgctgacatcttcatgtgcaaatcattccttctaaatcttaagaatacacacataagtgatatattccccttatatgttatagatgacatgaggaatgatttgcatttaggatgcatgatcaagtgcattagctcttcttgcaatttggtcaccagtgaaaagaaatttggggaattttgacactgggatgtaataaaatgggttatcaaaagacatgcttttttttaaaaaaaaagaaaatattttagaatgaggtatgccttacttacaaaacgaatgaggtatgccctatttacaaaacatcagtttaattccaagatgaaagcattaaaagatagggagaaaaaaaccacccttgtgctgatgaaatggtggctccagaaggcataagggctatcttaagacagtaacgtgaccaactacaaattatttacaatcagaaaaaagggaataacagaggaggcactactggatcaaggcctccaaactcatttagtaggattaggttttttccttaaaaaacctaattgattttttacaatccttaaaaaataaagcaaatgggacaatacataacctggataaagattatatgagcgtatttttattcttgcaacttttctataagcttaaacttatctttaagtaaaagttttaaaatatcccaaatgataaaagagaagctcgatcacaagtaatctattttaaaaccagaagatttgtctatgcattttatttcatatctattttcaagatagaaggcattgctctcctgagccacacatggaaaagaaagggaattttaccatgtggaaattttacctcccttggtaaattttatattttggtgggtttaggaattcatgagaaatgtgccctggctgttgcagtttttgtatatttatgccatctggatcaaagacagctcagactctcacctgtattgggcaaacactgctacatgaaactcaatccactgtaattcattctcttgaaatctttataaagaagttgcaagggaaatgcatggataattactgtttatgctcaaggaccaaatttacccctttcattgggtttgaaggagatggtaatgagcttcttttgtggccctgccattcaccagatgacaagctcttttaaactgaagcctggtttaattccttctcgcagaatagcattttagcaaacttgacagcaggattttatttatttattggtaaaagtattatgtacaattagtttaaaaaatctaactgtagagaaagctacaagatgagaaatagcaatactccccgcgctcctaactccatagtcactgttaaatatttcttgtatactcctgggagtagtgagtatacactttcacccatatgcatactttaaaaaaatacaaataatgatttacactttacagtaacatattttttccaaatagtgatacatcttactttccccctcttaataatacgtctagaacacgtttcttctaggttgaaccatatgaaattactgttttgctagtttgacctaatatctcaggacatgggtatagcccattctttagaccatgctgtagatttttcttgtacagatacacagatatctatcagtcccatattgctagacatttagtttgcttacaattttttctgttacatataatgctaaaatgatcactgtttacatatatcttgggggatactttcatgactatgtgttaaattcttagtagaaaaatttctaggtggaagagaacatatatttttaactctcaattttgtcaaattgacctccaaaaatgttaatgtttacaggggccccagttatgcagaacactgtggcatctcagaaattttaatttttgacaatctttttggtgaacatttttatttttatttcgttgttttgattgacattttaaaaatggttttgaacatcatcttataagcttatttgctttttgcatttattttcctgcaaaagttgtctttttcatatcttttaaagatcattcttttaattcagtatcattaatttgtgggcgtgatgtttaagttcaaaaaatttgctatttgtcaagtattttgcagtaatcaaatgagtggaaagtatgaggaaagttaaggaggaaatagtaattttgagactatgctacattccacatacaggctttttttttttttacaatttgatttcattgatttttttctttgttattggacttattaattttttgtggcttctgtattctgtctgacttggaatgacgtttctaatatatctgggttttcttgtttactttcaaagaagcacatagattcctgcttttctggaaaatttctgattataaatgtttgtaatatttgtacaatattatcggactatgctaccagaatttgatttcaaaaataagatagctacagtaactctagttaccacaacatagctatgtcatggtctacattaattagacatcctttaaaactgtttgtactcattcctccaccttcctgttctgtgctctcaaaacaactttccaatcattccttcagtgttcaggaaggtgatgctccagagaaggaatgcagttagaaagccccctgtaaatgatcaatttgtgttctagtgcaaagcactgttttctgaaagctgggtttcccctcaacattccagacttgctcagatgagacctcactcactgtggaagccggagttaaaagtgacttggaattataggttaaggaaagaggtagatcctttttctatcttaagtttccatctgaaggatagtcctgatacttgttccacgtaagccaaaaaaagagtctccaggtaacaagatcttccctgggacaagcgaaagttaaggcaacaaagcatgaggttttggttgttgtttttgtgagttttctgtttgtttgctggcttgttttttccaagggttcattggctctaggcagcccagctttcatttaaggaaaggttcgtgggcgtcttgtggcctccactccacatgcctctgcactatgtctatgacttgcaaaaacaaccgtgtgggatgctaattcagtctttggtttctttttcatatcaaatactgccaacttggccttaaatatgtgccagatgcacgatggttttatgatgtgataccgttaggaagtctgggctgagtatagctggatgtgagctggcttctgctactggagcggttcctgccgctgatgactccagcacaagcttgagagcttgatggctttgctgggtaccttggcaaatagtgcctggcagtggatggtcattgagtccctggtgagaactgcaggttctcttttctctgatgtccagatttctgagtcctatgagaacttgcatggtgcttttctgggaaaggaatgaaaagcctcaccatcgtgtagcacacagtgtcaaaatcttgtcacaaatatcccaggtactacctcctgatatgcatacctagggcactcttgcctttccaattaatattttaaggaagttttcattgatgatgggcccagaaactcaaacatatttaactttgagttaaaattaaacaccaaaggaatgagagagatacccagttgaaaaaataactggaaagtttagggagattatttgatctaaaatgactcctttggagagtaaaacctatggtcagagttctcagttcttatgtacaaattttacaagggacgtagtccaagcactgtaagtgcacattatttttatttgtgtatgttttctcttttgtttttattgcctgcaatcaggtgaaacaatggtggcagttcagtgctttatttctgactttgaccaaacacaatctcttttatgccaaactgtgatcagagatttattaccaagcagtgtgaaaaaattggacacttagaaaacgaatcgatgttatgattcaatgaaattcttaacatttttaagtcttgaaaatccaaggataacttatgtgcaggttctgttggtcactgtggagacgtaaatattttatttgtgaaatctgtttgcttactttgcaagtattcagggtgcagtaggttgtgccagaatatttagtggtactgataatagtaactacagatggagaaaatcatagaggacggtggtgatatgtcttagacatcatttccataatatttacaaaaagcagagcaacgaaagggctttctacttgaatcaaaatgatgtaccaaagaccaatctgttttcaggatgtggcaggcagcgactcccatttcctgtaatagggtcaaaacctcttgctaacaggctatcttctcccacacctccgtggctccaaaaagatatataacctttgctgcccagaatcttacttagtaaggggtatatgaaggtcatgcacttgtatacttggtgtaaaaataaaaaatataatccatttcctttattttctccttcgtatttataaacatatcctagggcagagctgtgcaacagaactttcttcggtgatggaaatgatctaaatttggctaatatggtagccactggcaacatgtggctatttgagtgcttgaaatgtggctagcgtgaggaaagaactgcattttaaattttatttaatttaaactgatgcatatgactaatggctgctgtatcggacagtgcagcccttgattagagcttaattttctcagtgaggattggcttgagaaaaacaccactaacgagcccttcctaaataacagcacaggtaaaataaaattgaacagatgtttagattttcctgaattcagcttaggcaagatttcataggatcatagtttcaactctaatggctccagggaaaatcattgattttatcaaaaacaaacaaaaaagaagctctgataccactttctaaaatgtttaaacaaaaatgcatgatttgataaataaatctatcacttggatctttaagattttcttcttctcaaatacattaatgttcatctgtcaggttcagggttaatttggaggcctcttatctttgtcctaaactatctccttcaaaatcctatgtgacaagattttcagtggagatattttttttttctatgttttcatgctttgcattcatcttcttttaaatcattaagaggtagggaagaaggcatgaaattactatcataaatacatgctgcagttggctttgcttcgcagatctgaggagagcaaaggtttggcttctgtgtgatccaagatgattgctatcgttccaaacagtatatcacccaaagaaagctttctattcccaaatgagtgatttttattgtatttgtctattgatttatttatttttatgtatttaggggggtaaaagtacaggtttctcacatgcatatattgcataatggtgaagtctaggctttttgtgtacccattacccgaatagtgcattgtacccaataggtagtttttcaaacctcacccaccttcaccctcccaggctccatagtctccagtgtctattattccactctgtatgagcatgtatatccactgtttggttctcatttatacataagaacatgtgatatttgactttctgtgtgagttatttcattgaggacaatggccttcagttccatgttgctgcaaaagttgtgatttccttcttttttattgctgaatagtattccatggtgtgtatatatgtatatgctacattttctttatctagtcctccattgatagacatttaggttgctttcatatgtttacttttgtggatagtgctgtgaaaaacataggagagcaggtatcctttttatataatgatttacttctgtctgggtctatatccagtagtgggattgctggattgaatggtagttctatttttagttctttcagaaatctccacgttattttctataaaggttgtactaacttacattcctaccaacggtgtaaatgttcccttttctctgactccttgccaacatctgttgtttttaggctttttaatagccattctgactggtgtgagatggtatctcattgtggttttgatttacattcctctgactagcgatgttgaacaattttcatatatttcttggccacttgtatgtcttcttttggaaaacatctgttcatgtcatttttcctagtttttaatggggttatttgtttttttcttgttgacttaaagttctttgtagattctggatattagcctttgttggatgcataattgcaatttttttccattctgtaggttgtctgtttccaaatgaggggttttaaaacatgtagactagcagtcaccaaggtgaaatgttttttaaaaggatcataatataaaaaatgacaccaaggcatagagtttaagagatatcaagtatgtgtgagcaagggtacatgaaataaatagtttgactttctgggtactggttttatttgcagaatatggagtgttactgcactcaaggaacagaacatcaaaatttataggggtcatttcaggcaggtgtcttgggccttgctaagctactatagctaattcggggaatcatggaaagatttaggcagagggtttgcaagtctgatttgcatttcagataaatcatactcaaagcttgatggtaatgaacttgtgaaagggatatccttcagggtaacttcagcaggacttggaaattgactggatgtgaggtacaatgcgagtaaagcagaagataaaaaatagaattcagtgttctcacttgggactgggcagatattgctgtcaacaattacaactggaactgttgttggggaataaacaaaactgagagaaagataatgagcttaatgaacccttggaatatatccttgggaaactatccagaagacattgagatgtttaagttgggattagaggagctatctaggcagaaagagaaatttaagaataatcttcattctggcaagtcactgtatatgggcagtgatgagctagaatcatcaacttgtaaaataagccaaagaaaaaggagctctttaaggaaacagagaagaaatgggaggagaagaaggaaaacaaatagaagtaaataatcaagaaatgaagtagtttctggaaggtcactgaggtaaacatacactatatagtggggactgaaactatcctgtagacattgtgttatatgtgacaaatacctgccttctatggatcacttctcttactcatttgctcctctctgtgctatattcctgcatattctcccacacatccttcaaaactcaacatagaggcattctcccctgcaggcaagctttcctgcctcagtgtctcacccagccaagctacatgagttgtttttccatttgaccctatttctccagtgccatcctatgttattgcagggatagtacctacatgccagcctccctctctgtactgcaagcttttcagggttattgtgggggactgatttgcactagggattacacatttcatgtgtccctgtattcactcctttagtagtgtcccttccacacttggacttgactatgtgtcttcttttggccaatggaatgatacaaagttgatttcagcagaggcttgaaagtgtttgtgcattttgagtttcttagactcctgctaccacaggcagatatgtctgggctaacctgatggtggaagagagattacttcaagcagaaccaagtcatcctcaccaaagctattctagactagccagcccctagctgacacaaaagctgaattcatgagcattacgttttggagtggttttctacacagcaataatgatacaattaggaatcacgccttatacatctttttaatttctagcacattaacccagtacttaacatccactgggtgttccatcaatatatgttgaactgaaaagcctagaagagatagaatgaaagttccaatctattgcaaagcatttttctttcctctctttctactaaacattatggctataccccaaggttcccactaacttttacctctgagattttaggagctaagactgcaggggtggttgtgggaaatccagcatgcgcagtgtggtttgaaatccacagacaaggggcgatggcttccttccttggcccactgccctacgcgcggtgagcagagcagccaagccagagtggcagccgcagtgtgggagcccagctctgctgccataaattacccaggggcaggaaggagcagtgagagtcagcggtttcagctacctagtagttcatttttgttcttgtttttcagttagcaatctgtaaaatttattgcaaaattaagctccctgctccagagtcaataatattcctggtgccaggtggtgtaataattcaccgaaagggcagaagttggagggaataagactgatttaggaagtagacttccaagccctattgctgctgcctattccctgctgctaaaggtcaggtaagtagagggctaaggttacagcctcctgatatccttggagggctagaatttctattgggtttgaaattgaaaacaaaaactgtttctattgcatgatggattccttttatccttcccacctctgtttccattttagcataaaaatagaaacgttcactttcatattttgtttctggctttgcaaggaagaggtactgtagaaaatatggccatgtgcaagcttcctgcagtgctttctaataccctaacatcaatgtctctgaactggaggggctattggagatctctctaatccaaattcttcatttacagatgcaaacatccagtctgggagtaattaatgattgttcagtttctgtccagacacttacttgaggctaaacactaaatctcattcccaggttatatgccaactgcttcactggacattctgcccctgaaaggacttcaatttttctttgctctttcttgattatgtacagtatctttaaaaaattatctctccctctcctattatttcttaaagagtcttaattatgggcctgattatctaaaaggactatgaagccacattttcattccagatgcaagggacaaactgttaccatcaactagcttgtatttaattatctttacaagttaattccctaatagacaattgaaatgccgtatttggctattccctatgtctctttcttgaaatgcctacagaatcatctttgcaacctgggatgcaagtttggtatttcttgggacaattagcagttgggaattacactctacaagttaaatgtgtatgaaattcaacatcaccatctgctcttttagaaaatttagatggaatttcttcatttcacatcctcagttctttattggtgttggagccttagccactagctcagtgctagctataaagctcagattagaagaaattgctttgatgttttcaaagtcaagaaagaattttacacctctctgagtagcccttgactgcaggtgaggaatgtacctctggagaggtaccattagagctaattgtatatgacctgattgatccatcagagctcttagagtttctaattgaatttgcttttgtcttcataaaatgaagatttgatttagttgtaagttgtggactggaggagctggctgcattccttatctgatcacacggatacagttgatatgatgatcagaagtgggctgcataaatccacccttgtcacccaattcctcccctgttacccgtgtaaatcaaggatagctccgagaagctcattctccatctaggagggaatgccagtttcacctcttagaagctgaggcttttctccagttattagcatcggggtgagaaggggcctagaaaccagaacattgtgaaacttttgtaacctgacctgaaactgggcaggaggagcttggcttcaggcttcaccaagaccttgaaactcagcccaagctgattaaaacttgagagtgtgagtcttttcaagtgcactaattgtgttatgttgtggatagaaaccatgaaaaaccgatgttttgaaagtctccatcttcggagaattttacttctaagctaattaaacatctgtttcatcctgagatttggatcaaaactcgaataaaaagttggaaaacaaattaaatagtcatagttaagccgtcaataaaacagatacacacactagagacatttattctgatgcagcaaaattaaatgcccaaacggaacatcatcttttcaattctctctaccagtatgttcaaaatataactaaatgatttttttaattccataagatactgactgtctatatcaagttgtcttaacatgggaattgtctgtactcaaaaaactttatttaatctaatatctcccgtgtatatacacacactcacacatacacacacaaacacgcacacgcacacacacgtacacaaatatatgtgtgtatatatggtgagcactctatgatttcccattggaagcaaaattaaatctagtttaaaatgttatttaaaattttgtgttcagctaggtgctgtggctcacgcctgtaatcccagcactttgggaggccaaggtgggtggatcacttgaggagaggagttcgagatcaacctgggcaacatggtgaaaccccatttctactaaaaatgcaaaatagaaaaaacagatttaaaaaattttgtattctattgtccttatcacttcacacacacagatacacttcatttgtctacccaccatgcatccttgtccttacacttgaaagtgtcagcctttcagaatctactgtatacaatcaagagaagaaagtcatcgcttcctcaactagccctcaaatcacataacaacaaatggtctgcaattgattttatgtggagcagatgtatagacagtatataatgttgtggtgaaaggtgtatatactttgaaactggacagcctgagctcaaatttctactctcccacttattagctgtatgacctcaggcaagtcatttaaactgtttgagccccagttggctcatctataaagtggggtaacaattccacccatctcaagggatgtggatgaaacgaatcaatctacacaaagttcttgaaatagtgccagggtgatattacacttacataagcaacatgcacgtgtttctcccttaataccctaaatgtcttagtaatcacatatttgtgaatccaaatggttgttcatgcagtagataatttttcgttaatgcaagatatacctaattaacgtgctccaagtggaacttgtttggtatccacgtgccgccgtccccttgaaatcaagggtattttccttgtagttaagagcgcttctgcttgtaaagcatatgccacgaagcccctgtataccaatttagagattttaaagatagtttttgtgtgtgtgtttgcttttgcttttgttctggtttgtatcaacatttattcttcttatcatcgcaaaggagaacgaaggctggctaacctgatggaatggtttagttaggaaatgaacggacatcacctggtttgagctgactcttgtctctggcatctgttcatctttcacacacctcttaaaatagtaaaatgttatttttctagggtcattctcattgggaaaagctttaaaagatccacttgaaagttaattgtacacagggtgataaggctttcctggttcagggatttgtttcaaattaagctataaatcagtaagtgtgctgcattccctggttctctttatgatcctgagggggactgcaccattctttaatttgaaccttaaatgaaagggaaggagaaggggaagtgaaaggaaaactaagccttaagattttaaggaaacccatctatctatctaggctctattctccagtctttccctaagacaggtaaactctgatgaagtcacctctctgttaggcaatagactggataaattcccgcatttccatgtcatgtgacttttattctttcccataatacaaggaggatagatgatctcctagcccctttttgctgtattaacttttagattttgaccaaaacatgtttttcttcttgtagggatcatggctacattgttgcctccattttggagtttctcctctgtaaacccaaatataattgtctctgtccttatttcaataacctttggtaatctcatcaatttatcagatggtaactccaagaataattgcagtatatgccaaaggaattcaaaataagagcagattaatccttgtttgcattcccttctacagcatgagctagcaacttctcatccggaaggtaccaaaccatcagtaggtgtgggagagccagttattactaatgatggctcaggaaaagaccacttacatgcataaggaaagataaaaatagagtgtaaaaagaaagtactttaaaagggttcataatgtctcccctccaacaaatgtcctttctaaaatgtcttaacctttcccatctgcctctgttttgtgggtcctcctttctcagaagccagagagaaattcccagtggctgctgatgtgttatctttaggaatggaaggttatcgtataacatgcattttcactgcttgaatcttaatttcctgcaagctgccccatctatgagtcaaaataatctaagtgtggaagacgtttatagaacgtcctctggcttattcctcatcactgagtgggtcattgatggtgtgactctagcattgaaaccagggcatttttgagagtgagaggaaaagccactaataattatctagaatagcagaaactggaatgatcctacactaattgggatgaattattaaggaataactgggcaataaataaaaacttattcagtgattgagttttaaaaagaaatgaagaaatcaaagtaggagtttctttttactattatatttagaaactgtgctgtgtgctttgtatctattaactcattataatacctgtattaaatgggtgtcattcccattttatggattagaaaaccaaggctctaggaagtacagtcatttgctcaaggatacaatgtattatatgttggggaaagcattgaattagaatgcttgaattgaattagcattgaactagaaattctgtaaatttctaatttacagaaattagaaattatcaaaggaactaaccaaaaatgaataaataaatgattgagggaatatgcaaataaatgattgaataaaaaaaataatgtttaaaaacccagcaaatctcggccgggcacggtggctcatgcctgtaatcccaacactttgggagggccaggcaggcggatcacaaggtcaggagatcgagaccatcctggctaacatggtgaaaccatgtctctactaaaaatacaaaaaaaaattagccgggtgtggtggcgggcgcctgtagtcccagctactctggaggctgaggcagcagaatgacgtgaacccaggaggtggagcctgggcgacacagcgagactccgtctaaaaaaaaaagtccagcaaatcttactcatgagatgaggagaatcctgtacatatgaccatttaggcttgcagaaatctgccaatttaaaaatactcatagctaatttacattacctgctcttattttacttttactacatcataaagatgatagcgaattccagcaagtaagaaagttaaagctcaggactattgttatggcaatttctccaaatggaggaaaaaaaaaaatatatatatatatatatatacacacacatatatatatatacacacacacacacacacacacacacacacataccttcctagttatacatggaatagtttaaaagagcttttatacttttacctgctaatttcactcatgataaagtattttaaggaaataaagctgggctttggcaccccttgcataggccagtagttagatgcaggctgctctggggaggggttgatgttttgggctggagcctttcctcagccaagggcaatccccagaaagaaacccaggctaatgtatgacctttagcaagttactttatcctgtttggttctctgctttctcatattaaaatgagggttaataattaccatcttatttactatgcatggttgttatgagaatcaataaaatgtcactgtatctcaaaatacctcaaaatataaaacatgaaatacgagagatgttgctgtcagtcctattgctctgaacaaattagaaactcaagttgggctgtctctgagacctgatcttttaaaagcaggtctttcagcaatatagtctgcctttgaaaaggttcataaaagtcaactgtgtttagtgtatttcttctctttatgttctcttctatttcagagttgtttatttattttttattttttagagagacagggtctcactatgtcacccaggctggagtgcagtggcgagatcatggctcactgcagccttgacctcccagactcaagcgatcctcccacctcagcctcctaagtagctgggattataggcatgagccacagcaccaggactatttcagggtttttgagttcagaaagttggtttctgcaatccccagattgctcttcactgtttccagtgacttttgaatagacactttgatttttcatctttaagaactccctgttatcttcaaaatgatacattttaatgaccactaattcttgttttatggatgcattattcttagagatacaattagattacagattcaaggtgtttgagattttctccctttcttgcactatgttttatgaagtgataactcttctactttctcaggtagatccttttcttgtaagtctgatttgcttagtttgttctatgaatatataacaatttacttctccattctactcttggtgaacttttaagatttttttccagtttgggactactacagtaatgctgggatggctattttttttttttttaacatttattctggttcatataagctagcttgtcttggttatattttaaaaagtggaattacgaggtcatgtgtatgcacatcttcaactttccttgataatgctcaactgttttccaaaccagttgcaccatatcacggtcataccagtagtgcaggtcttcaattgttagacgttgtagcagatgttgccgatgccccctatacctggcactcaccattttcatgcatgaccaactcaaaagcttccaactacaaacacctgcaactgtttgcctgagggcttttcagctcacaagtggaacagaaattaaccttttccccacctggccctggaagttgccctaaaaaaattcctaactggccagggtcggtggctcatgcctgtaatcccagcagtttgggagacagaggcgggtggatcatgtggtcaagagttcaagaccagcctggccaagatggtgaaaccccatctctactaaaaatacaaaattagccgggtgtggtggtgcattcctgtagtcccagctactcaggaggctgaggcagaagaattgcttgaacccgggaggcagaggtttcagtgagccgagatggtgccactgcactccagcctgggtgacagagtgagattccatctcaaaaaaaaaaaaaattcctaaccataatgatgcataattccagctcccctttcccttcccacaagtgagaaagctctgaggtgtattcaccaactcctggtatttttaggagataaagctctacttgctcacagtgataactcactctgtagtgatcttttatttggctttcatctgtttgtctcactcccccattttcatgttagtgtttcctggtatcattttccaaataaactatttgcacttgaatccttcactgatacttctcaatgtgtacaggttgagcctccctcctgtcatcccacgcagccttgtggccttactcttatgataacattcctcaccctccattgtattccagagtgtgagctccatgagggcagacacttgaagtgacacgtgagttttaattgtggcttcctttcttcgtggttctcttgatttttccctcacctgtgttcataccttgttttcaggcttatttccctaatagtgacagatttgcatattaaactctgaacattaagccatgaagaaagcataggttgttctgtcaaatccttaaaaaatattacagaccccgagactgtaactgtagcagcgcttcccaaacttctggctactgtctacgccaggcagggggaagggaaccatcaccaggaagacaagtaccacattcgtagttatagaaatatccacattctctcaagtcagaaacacacaatggacaagaccatgctccctctttctgaaacaaatatccagcaggtggtttgcacttgaaaacttttattaaaatgttgctggggtgagaatatatcattatttgtcctggaaaactcctcatctttgattttggccattcagttccttctttgggaagtctcatctcttcatgggacctttcctgatttcatcaaatcatataatgaaataaaacatatattgccctcattttcagtattccttacttttacatttaggatctttactatatcattctttgtaatgttattagatcaacaagacatgatctctcgcaatgttttcagctctaaagctttacatgactattttgtgtgtgagttatccttatgttttctattgaagtccatagcacattgaaagttagtctgatagatacttgccctcattccaggcacctcctgtgttatgcctatagcatatgctaaattaaattcattaaatcaaagaaataaaatatttcactggaatagaaaaatttgctctaaaacaatcactacctagataggactttgagatctactgtctcatctccatccaaattatatgctcagccttatctcttcccgctaattataccccctcttgacctgtaaatgatgggaatgactcactgacctttgctgaactggttttaagtttctctcctgtttgaaaatctaatgcattgagtgttttcctgctataagttcctagagggctgtgccaaggtctctcctttgagttacaatgtacctagcataatattaagcccaatttggttcataagaattggtttgtgattatatggttattttttatgtatatggtgtgattatatagtgtgactctgaacaaagtcacataaagtggaagtacataatataaaggaatgcaccctcaaaaaaccccctgcattaacgcaaacctcgtgtaaaagaacagaaatacagagggtgctaacataggataatgaaaatgtacctcaatagtttgaaagcataaacaaattcttcctcttttaaatatctgatatatgtacacacgtatactatcactggacaaaaacaaaaattatattcagagatgaatttttttatgcttagaaaaagttagctgacttttaaacctcattcttgagaatcttccatttcaaattggaaagatttatgtgtttttattaaagtttttaaatacttcagaataataaatagcattttttgagattgatttaatctttctcatttttactcccatagcaacaagactgttgagttgcactagtcatcacttttctccccttgcccagcagacctctcctaaattactctgagtggattttagaaagattggctatcatataaagtgtgttgcctgtctcttcttccatttcccctaaaggcaaaatgcagtgaaaacaaaatggaattaaaacacataaaggaacttaactagaacgaagtaaaaacttcttgtatttgtcagaacactgagataggtgagaagctccaatgctttaagcatttcttttctgttgttgttgtttttttttttttttttttgacagagtctggctctgtcgcccaggctggagtgcagtggcacaatctcagctcactgcaagctccacctcccggattcatgccattctcctgtctcagcctcctgagtagctgggactacaggcgcccgccaccgcgcccagctaattttttgtatttttagtagagatgaggcttcactgtgttagctaggatggtctcgatcacctgacctcgtgatccgcccacctcggcctcccaaagtgctgggattacaggtgtgagccactgcacccggcctgctttaagcagttcaaaagagatgttagcattctgaatttaaaagtgttgaattctcttaaaatctgaagtactcacaatttttaacatggtaatccaaaccagaggaaacagaatctagataattctcaactctgctactacctctgaattttaagtggaatattatcagtgatgcattttttactgtagtttctatcaatataattttcacaatcggctgggcgcagtggcttacacctgtaataccagcactttgggaggctgaggcgggcggatcacggggtcaggggatcaaaaccatcctggctaacacggtgaaaccccgtctctactaaaaatacaaaaaaaaattagccgggcatggtggcgggcgcctgtagtcccagttacttgggaggcagaggcaagagaatggtgtgaacctgggaggcagagcttgcagtgagccaagatctcgccactgcactccagcctggtcaacagagcgagactccatctcaaaaaaaaataaataaaaataaataaaatttcacaatcaactaaattctataaaaattccattgagaggccgggcgtggtggctcacgcctgtaatcccagcactttgggaggccgaggcgggtggatcatgaggtcaggagatcgagaccatcctggctaacaaggtgaaaccccgtctctactaaaaatacaaaaaattagctgggcgcggtggcgggcacctgtagtcccagctactcgggaggctgaggcaggagaatggcgtgaacccgggaagcggagcttgcagtgagccgagattgcgccactgcagtctgcagtccggcctgggcgacagagcgagactccgtctcaaaaaaaaaaaaaaaaaaaaaattccattgagagctaactagattgataacctagtaaaacacagagcatacatccaagtgaaactgataggctatacagttgcacagacagtagttaacactctgaacatggaaagttgatgtttaacatcaaggaatgaagtaagtgataataaaaatgctgtcttgcagatttgctcttctgtgactcaactaaaaaatattgaactaaacttaattccttattctctctgcaatggtattcattagacacagctcagggcatagttcacctacaatgttgcagttaatttcactttattcccaagccatgaaataaattcccaaactcggtctgctaccttgcaaatgttaatttggaacaatgcaccgtgctgatccatcaccgttatttttttaaaaaaacttaaagtctgtgatatggataactaggattcgtatagatttaactgtttaagtaatatctttatgttattctcagattatcagtcagctgattcactggggtggtagcaaggtctttgaatgtgagaacacagaacacctttgcattaagaatgcatcttaggccaggcgcggtggctcacgcctgtaatcccagcactttgggaggccgaggcgggcggatcacaaggtcaggagatcgagaccatcctggctaacacggtgaaaccccgtctctcctaaaaatacaaaaagaaaaaaaaaatagccgggcgtggcggtgggtgtgtgtagtcccagctgctggggagactgaggcaggagaatggcgtgaacctgggaggcggagcttgcagtgagccgagatcccgccactgtactcgagcctgggcgaccgagcgagattccgtctcacacaaaaaaaagaaaaaaaaatgcatcttatcaactagagaggttgatttctcaatttaatgaattgtattgggagataattagcaaagtcttgagagaggaagggaagtctattaccagtcaagcagtgttaataatgaacagcatttatccagtattttcttgttctaaatactgtgctttgtatggattagtcctcacaggcccgtggcagaggaatattagatgcttcattttgttgtggaggaaactaggtcatagatggtccaaagctagagaggtggtatgtggcagaaatagaattcggacccaggctgtctgaccccaaagcctttttcttatgtactgatgaaccatggagcgttttccagtaagggctgctttatttccaagtaggggaatatacatcaacctacataagggcagaaagtcaggctgggttttattgaaaactgaaataggaagctggaaagccactaggagccaaaatctctttctttgttatctgctatctctctccagctctttcttctttcttgctttccttcagttggttttctatgctttcaaatttctacattgtccaacatgagttaacaaaagtctgtgtatgtctttattaagattttcaagagatataaccctggttgattcagctcatcactcatatgctgctggataaaaaatgacttgtctggttaagatgttcagtcttggtccccaaatgggagagggtaagaggcacatagactagagctacagctgccatggaccaggctaaggatggagattctgcagacatagtgccatctccttctcctcaggccactggcctatgcaggcctccatacttcagtcagctcctggatgccttccttctctgcagcttaagggccaccttcataaactgattgaggtccagagccaaggaagaagctacctaacccttcaggtcacttctctgtgtatgatgagggcttagtaaaaattaatgcttccaagaactacagtcatttttatttcatcttagcaagagagatctcatgcctctatttggttctttaatgggtgagggatttgggcctagaaaatgaggggaaattgagaagaatactcttaaacctcccagcaagagaagaaatgtcttgctgggatcatacctattccaaaagatggaagtattgcagcgagttctcttcctctcttactccatctcctgttcttcactgagggaagtgggaccatattgactttcctgctgaggcaataccccctaggatataagcagaaccctcaggaggaactcaaactttttcccctttgtctttggccttctttagagtagccttttttatgtaacaagatttccctgcaatttagaccaccattgccttaaggagtgaggctaaaagctgctgtttacttttctaggcatcagggtgaaataattcctgtgtagtttagatttccccaagcactacattattgtgttatactactgaaaattagcctctatatctttattatggtatacgaccttgctggcagaaaaaacactggtgacattatagatccttaattatatagatccttaattaatccttatagattctttattcatagttgaatgaaatgaaaatggaactattttgccatctctggttagatctcttaaattggctttggaatttgttggcttggcctctgaagaacaaagagttgggaacgtttgaccttgcctgcgattaactttctcagtgcatggaatttagagccagactgggcttctttctgcagtccctttagtcagttcacaggccagtggaagcactagtttttcaaggaaaagccaactcttgacatagcaagatcagagctagaatcctaggaagcatgcttggctgtacacgatccctctaatttcaaagcaaagcaatgtaaggagacagcttggtagttgttttattttctctagagtggacttatgttgtcagtggcagaaatccatgaaccatgaagataaaataatgctaaccagagtgctaagtaaagaaaacaaagatggctccacaattagtagcattatatatgttagtgctaagtaacaacagatgtgtctgcagggagagaagcattccttgcaatccatcagaaaccaaagttctctgacaccacaagccattatgattatcttaggcttgggggatgatggctgagtccactgggttggcaaagtagggatgctgttgagggtgttccaacctacctatgtcatccttcccatgttgcacacttgtgctgagttaacagggcgatgtgctctgtaaaatccggttctgtaaagacatgcactagccatgagtcattagcaagcatgcgaagctaattggcaaaatactcataaaatattttgaaggtgggttaattacaattcattacacagtaaactgtccccaggctattgttaaaaagtacaggagtttcagggcccattattttatgattcattttgccatgttgtgaaaaacagactctaaatcaaactacatttattataggtcagaccacaaaatctttattggtttttccaacattccacccttgttatatgaattcatatggactgcacatttctgtcaattggcaagaaagcatgaaataaaatttatgatattttcttaccttatcctcagtgtagccttaaaaatcacaagatctaattgcttcccctacttccccaagttcatgcaagaaataagtatttcaaaatcaactccaaagttctaatgattgaaagcaactaaagcataatgaaatctgtcttctaaagtaagcatcttaaagaaaaactcaaagcaacatccacttgaaatgtgttgaagcttttttcccgctctacccagtaaaatatctagaatatactttacatttggaggataatttgaagttcattggctccataacacaaatcttgttctcctcatctctacctttgaaagcatctttcttttttttttttttttgaaccaaagcaagccctcagcatttatttcttgaaaaaacaaaacaaaacaaaaaccctctggtacagttgtgtgcctcctgttattaccataggcagatttggtcagaatcatgtaaggcctcataagtagtcattctgtaccattacatgtaattgtttgttgattaatgctttcaattatgttgattttcactatgtgacccaaaccaccttgacatagccagcctggtatactcattaccggggatgagcaaggaacaaaatgctaggttcacttccagcctccaagagttcagcagctcatttgaaccttatctgaactatcaaaagttttgactctgcagaaacctgtgtttggggaaggggcaggaatgtgtggctcaagaaaggctttaggatgaagtgggggttgtggggggagatgttggaaattgtgcaaaaactagtttccttgtgagtgatcaggtacttcctgattctggctgggccagaaataccacaaaagcctttcttgaaatttctgagatctttggaaggtcttcctccaagcagtttgccagttctgcatgcctgggttttggctagggctggagaccaaagtatgtgcaagaggaaaccgtttaatagaaagttacctgtatacttaagaattgtcaaaagagttttacctctactagaataaagcctgaatggtttgatcagtgtcaatgatcttaaccactcccattcctcatagaaagatgaagctgaaagatgacattggaaattgctaatgcaacccacttattttataggggcagtcaggatatccatagaaactattgactgggtctatacacatgtggaccagagtgagaactaaagagccagtagaggaacaaaagaggaagaaaggggagccaagctgttgaaaagcttgagttctgtctttactctgccatattagtggtgtgatcttaggcaagtcactccaattctctgatcctctctggatcatttcaaccacaaaatactaaattaaatgttgttgtaggatgaaagtactaagaaagggtgatttggaagccagaccaagctggatgaaaagagtgtcaaattgggaagagaaagaatggcagctaggaaatgctggtgagttggagagaaaacattgagtggaaacaaaagaaacttgatgggaaatgactattttgcattgagtaacaacagacaatcataacataacttgaggagaaagtaaagttgtttgatgcaattttaaaagatgtcaaaatagccttaagttttatgaaataaacgaatattccaaagaggcaagcatgaaaggaagaagtgttcaaatatgggagacactaggtcgggcgcggtggctcacgcctgtaatcccaacactttgggaggccgaggcgggcagatcatgaggtcaggagatggagaccatcctggccaatatggtgaaaccccatctctaccaaaaatacaaaaaattagctgggcgtagtggcgggtgcctgtagtcccagctactcgggaggctgaggcaggagaatggcgtgaacccaggaggcggagtttgcagtgagcagagattgcgccactgcactccagcctgggcgacagagcgagactccgtctcaaaaaaaaaaaaaaaaaaaaaaaaaaaagggagacactaggacaaattagtttcctaaatcatgcttcacgggactaagggccagagcacagaataccccactacttcttcctcaaccagagcagttgccagtttatctcttccaagcaagcttttgtttaaagaacgttttctgaagctaaggaaaaaaatttctaattgctaaccttgcaagaaatcaaaaaaacgagtggtactttaatgagttcatttattgtgacacctttaacagatacaactgcaggcccttgagtgaatgaagatctgaagtggctgttctgtgtaaaatacacgtggattttgcaatgtggccattctaattggcaggtaacttcaacatcagaaatctccaagctgggctctctgaggagagcgggactagctctcttataggcaccaacattgcagtttggattatggttttttgacgaagggtattcagtgtgtcagagggaaggaagtccagggccagggtcagccatctttccttctgcccgcagtaatgttgacctctcgaggaattgatgacagtggaagagttcgggaaaggaaagggtggtcagtagctccagagtataaacattgggaacaggtttgagaagaatgctcaggaaaatagaaacaactaaccagcaactaaacaactaaattgcctgacagggaatcatggaagctaatcaatgcaaaattggtggtcaggtaggggcgggcaatgttgacattgaagtcttgtggacaggcttcctgtgttgatttagtaaccacacaatgggtaagggagaggggatctctgatcatagcaccactaatactaggatgcttctctttgacaggcatagggtattttttttcttttaagcattaagtaagtgagaagatcaccttcctttctttctcttttgccctaagggcctgcccatttccagctgcgtaattacctccttcataagcctttactctgaggcatgaaggctctagccagtaccctgactaactccctgctggggatgcctccgctgaacagagcagagagacctgctgatttcagagccaagcgcagaaagcagctggctcttaacttgttgtttaagagagccaagcagaacagagctgacgattgcctggccagtgggagcctgagccaggcacctgtcaaatcctgctttgctgggttctcctgcaccctgctctgcagtgcgcttttccgagactggcggtccacaccccacaggctttctccctctacagccaaccagctgccagcacccctgtaaattctttctccagctaatattttgatccctaagcaagtttctctctcttttactggcaggaaaaaaaaatgtcaaaaagggaaaatgatgatgtctctattttcttctgatagcaggctaccaaacactcccagcatatccattctttcgctttgggaaagagggaaggcaaagtggtcttgacggtgtgtgtgcaaggagagacattcgaatgtgtatttttacctgtcatttgggtcttgagaaggttgaagtctgcatatggaaaaactggccctttctcttctcagttctgagttttagagttagtaaactatgtaaattattttatttctctgtgctctgcatccaggctgatgtcctggagagagggctttgaaaaactgcccctgaagctattggcattaactgaaattgatgtttcacaggactgggataaagagggttatcagtagctcaggcctggcctgccttggggaccactgcccactggattacctattggcttagggcataggcactggcttaggaattaaaagtactaagttccagacaagctctgtttgtgaaatcacttaggcctccagcaagctttagcttttccaaggttttagtgctctcatttgtagaatgagacggtcagttagacatcacctccaaaacgttacgagtttcatgaatctggctgcacttactttgtggagccatcagccctaacctgaagcctgggaaacaagtaaacgtgtttcaagtttcttaaaagttgctttctcaagttacttcctttcttcacacaagaaatgaaagggaaacactgctgcaaagagccctggaaacaggtcctgattttagaagagagccttgagatgacaggggcatggatgtcctgcacattccttcagcataaccgcagaaagcctgcatatatttttcgttgtttgtaattgcaaacttttctaaaaatctaccctttagaaatgattgcctttctctgaggatcagatcacagtccagccaattctcagagaaaattaaacaaagaatactgagcctggaatctgtgattaggatgcctggcgaagtaaaaatgaccgtgtactttcccaagtgggtcagctatggccccagatatccaaacaggatggcacatgaatcatgccggtttgatgggctctctcaggctggatttacagctggatttaggactaaatgttggaggtaaatctaaaggagcagaagggctggggagggaatgggaaatcaagggagtttccatcaaagcttttcagaagcagaaatccattctacctttgtcgatgactgtggtttgctaggatcaagatcaaaggaatcaccgtgggcagagccatgacaagtatgaggctcagtctggtgcaacctagcattagcccctctcttaggctgccgtctagactggaagtgggtgctcataccagaccaggctgagtgtgtagtcagggtactgtttcatgacggggcaaaggacttataaagcctatcttgatctccccagggaagcccacagccaggggcagtgaggcacaaagtagctatatccctgattatgtccttgggaaaacaggggacatggaatgaccatgaagccaggtggttgacagggacaaggaactgattttggcaaaatccaactggcttgttttgtgtatctttccctctcctccctgattgctttagaaggctgctctaaaagtttactaaaaagttgttcgtttgcaggcctaagacacttgatatttgaactagaaggtcttcttatccacactttacagaccgaaaaactgaggcacagaggggttaaattaggtcacccagccatgggtggaggatccgggaatgaattaggacagattcattccacagcccatctcataacgactgactactctaaaggatattggtaaatttgaatcttatttactggaaaagcccctcttgtagagctggtgcatcacagataccaaatagacctggttcttatttgtattccttcatttataagactcacagtatatctattaagttacaaagctaaagattaaagaatttggtgctgagaacatgaatgtaaactcatcatttgttgctaaatgtattggggtcagtcaacttgggttagtgaccacaaagaggaacttttaggaggcccatggctagctttagaaatgcatggtttttgcctaaagcaaagtcatcttgaacatgttttgatattatctaatattccttattgttttcataaacacttacggctcaaaggaaacccaagctcaccatgcccagaaaatcttcaatcttcctctccccgttgaggctctcctcccaggactggagatagtaggacaggaagctagcactctacttgaaaaatggaatctacctagtgctgactcatttccttgcaaaatgttgtgtgtgagctatttgatgcccccagaatcttgggagtccttttggatgaattttataagccgttccttgatacagatactgcatgcttagacgctacaggttgccaagataactcaaccccaaaagacttaaggtaaatgaaatctccaagtcccaaggattaggtatgagttttggctgcttgggttttctcacacaaatgcctcatatggcagcagagcaggcagcaccctccgcagaattggattatcttgatgtttaagttttgcaaatggatcattctcaactgaccatgtgaattgaagaaggttgctgaacttttgctggcctctaagccgtgggcaaatagagtgaatcctattgattaaacccaaagcttcctcctgtggaaaatcctatttaagtagaaggattattactattgcccattaaaaaataatcactatattgggctgggtgcgatggctcatgcctgtaatcccagcactttgggaggctgaggtggcggatcacctgaggttgggagttccagaccagcctgaccaacatggagaaaccccatctccactaaaaatataaaattagtgggcatggtggtgcatgcttgtaatctcagctactcgggaggctgaggcaggagagttgcttgaacccaggaggcggaggttgcggtgagccaagatggtgccattgcactccagcctgggcaacaagagtgaaactccaactcaaaaaaaaaaaaaataataataataataatcgctatattgtacctttcttatttgaaagggagccagaatctaaacagtaaagtgtggtgagggggttgttgttcactagggtgtctcccatagtacaagtttatgattgcatagttcctgtttctagtgcttccctctactctccttgacaggttttaaactagatagcaagattttaggtgctccactgcataataaaagtgtattggagtactgtgtggattcgagcactggcttcttggcaggaagaagaaaaccctcatgaagggtcagaagtggaagccatacctggtacaggtcttgttaactgaacattactctattaggttctcttaattatttgaaaagtcctcttcctccttgctccaggttccctccctttaggttgaaccttccatgaattttacaatccatatcattttctatctaaatgattaaagcaagagctggcaccctctcaggaccagcctgctaagtattcatttattcaccgtaatttaaggctttctctgccaggagtaataaccctcctcctccttcaggccattctggatgcagaatctgaatgtcagcctggggcgaagaaaggaagggcagaaaggacagagaagaatataattgtccataggtttccatagctttgttaatatttttctttggtggattttgacactggggaaaggtgcattaaccttcagattactctttaaggaaggtaatcctggaaagataaagaggagttttgtgattttggagcatttctgccttacaaaatggagagagagtttcataaaataataacaaaaatcagaagcaacttgaggaaaaaacctagaaagaaacaaaacaccaggaacaaagacaaaggagctgttcttctcttcttttaggttccttctttctggtatttatttatttatttatttatttatttatttatttatttggagatgcagtctcactctgtcacccaggttggagtacagttgcatgatctcagctcactgcaacctccgcctcctgggttctagcaattctcctgcctcagcctccccagtagctgagattacaggtgcatgctgccacacctggctatttttttgtattttaatagggatagggctttgccatgttgcccaggctggtcttgaactcctgagctcaggcaatctgcccacttcggcctcccaaagtgttgggattacaggcatgagctaccacgcccagcctctttctgttctctttatcaccaacattcattgaataaatgaatatgtggataaaaaaccagtgattgagtacatttttgaatgaataaatgaatgaatcataggtcagtgttcctcaaattcattcattttcagaatcaaatggaagccctttttataatacagatccctcatctaccccttccctttccatcccagagtttccaattcattaggtcactaatggagcccagggatctgtattttcaactgcttcccaggcaattccaatgatcacccaggtttcaaaaccctaggcctacagcacaaatgataaatgataacatttaggttctgtctctcatttctcctgctattggccccacactgaatttagttgcagattgatattaatcagttgttttttcctcctccatctgactagctgattgccctgcctgtcatccttatgaattgcaaatgaaatatggtgacatttttccagaagttatgtcttagagactttccaattttaaaataatcaccagggctgggtgcagtggctcatgcctgtaatcccagcactttgggaggctgaggtggctggatcatgaagtcaggagatcaagaccatcctggccaacatggtgaaactccatctctactagaagtacaaaaattagcctggcatggcagtgcatgcctgtagtcccagctactcaggaggctgaggcgggaaaattgcttgaacctgggaggcggaggttgtggtgccacttcactccagcctgggcaatggagcaagactccatctcaaaaaaaaattaaataaataaatataaaatgatcatcagattttccatcctgttctatctcaactcttgtggaattatccattcatgcaaaaaccaacaggtcccttgctttgtttgcttgtttttggttagaaaagagtttgcttccgaaatccattggttttaaaaatgcctcatcatcatctccctgcttactcatgtatatttatcctacaaatatgtatcaagtatctctagtgtcctgggaacactgtggatacaaagatgaaagatatcacccttttccttagggaacctgcagaccaatggtaagctagatacaaaaatgattatttcacactccagatatggtggagggatgcataggttaggaaagttggggtatatattgggttaggaggaggataagtcttgaagaagaaagtgaaagctgagatttagatgatgaagggaactgaggtattatgcctgcagccaaaacctaaaactttggagaactaaaggcaaagctgtgtgtgtgttggaagggatggcggtgggaaatgagattggatatgtagacagggaccacattaagaataacttcctaaaatattgagttttagtctgaaggcatgggaatcacatatgggacttgagcatggggtggacacaaacaaaataaaaaacccatatatttaaggaaaggcgctcttatcatgatggggtttgcctgactttaaatttgccatatttgagacagtgataaggatctaaatgaagtttcagtcagaggatttaaagagcaaaagcagaagaaagaacagaagcaggagaattaattgcttgaccacctagagaatgatgatgtgattatggaagcaattgtttgactgatttttattcattttttcctgtgaaattcaaagaaaatgctgacagcatcataatatgacagtccaaatccaagcacttcagcaagtggggatttatttatttttttcttcttatcaaggttgaaagatcttctaagcacacatgaaagaaacagcagggccaagactactttgaacttactgcatacgattcctttcatataagatgtgcttgacaaacattaattaagtctcccagcacctctttgaagtaatgtaggaaatatgtagaggtgggtaaactgaggccccaggaactagaaggagagcctgaggacataccagggcaggtgcagcatttgaaaagaccctcacaggaggcccctctttctctgatgaggccagatgtaggtgcttgtttccaagcagaggtcttccaacaagttctctcaaccaggcaggggtgaggcagactagttatttgctccaatggccatactctctgacctaaaactttggagaactaaaggctcctcagacctggcagccttgagcctcatagcacaccctatctacctataatccagatccaccatctccttcctgaaattgacagctgtgttgcatctctcctaatgcttgttttgtccttataactggctgagaccacttgattcaatggctaaaagaagtaccctgagtcactttggtgcctgagtttctgcttttttttttttttttttttgctttttcatttttggagattagcctcactggtttagcatgaaagatgtttattacgggcaaatggagaagttgagttgtgatacaggccccttggcagctttggccaaactcacagggggctctaaagctgaaatagcccttcaaaattgtcccgagttggttacttccatgttgattaatcactggatgtggctcttctgggaagggcagaggctgaatcaattcctgaaaaaggtgaatggctaaagactgtgcccaggccacattaggaaacacatcttctgcttgctaaactaggtgcatccaaaaagacggaccttgatcagttttattggctacccaaatatcaattcattctacacattcaactggtcttctaacctatatatatatatatatatgtgatgctggaaatgatattaaacactaaagcaataaaatacgaagtctctgcagtcaggaaacttagtctggtgagagagatactaaataaatagataaacctagaaacataattagttcagaaacggctaaatgctttaggcaataaaagaatcagagaggaaatacaaaataaacatacacatgtgttactgaagagaaaaatatggaaaacactatcatttagtgttattctcatctagagaaataaaaagtctttgatgatccaacaaggtatgcagatcactagtaatttagaaggttagaaaactaagagttatgattgaaacttacggtaaataagtgaaaacatttttatattgcatttttttggcaaaaagaacaaaataattaaaataattagagaaaaataacatttttagaaaggaagatttagaattagtaaatcataaacaagtatttggtaaacagatctgtaacgacaaatgaatatttttgttatctactgactctttttatttctaatgtattcttctaaatccactgtccttttttttcttagcaaaagtttttttggcaatatttcttaaagaaatctttgactataaacatgttcagttgctttaccaaaagtaataatttcttgcaattcctgttcctgttaaaatttctaaggaagccattcaaagatgagtgacatctagatattttgttcattagttcgcttaaccattgattttctattttatttactacattttcctttttctctatgatttagctctccaaaacatttggtcggtttatatgaaaggggctatatcataaacgcttttaaggtctatatgatttatacatacagctctcatgattcatttctcaaatagccatgtttgtggattttttttaattaaattcttgatttatgtgaaatagataaatacacggatcattcagaacaagggtgtctgtgtctgggggtggggaggggaaggacgggagggatttggatgcatgaataactccctattggtcctaatgggatttgcacaaggaagactcctgtattccaagatacaatcttccttcattctgacatgtggttagctatatgttattgatatcataactttaatttccgagccatgttaaatcgatacatgttttagatgtcccccttaaggaatgaaacataaaagaatatgccttttttcttctacctctccccatgttgtatttggcaaattactttgacattctaaaatatcttatctacttctgactttaaatcgcttagggctgcatgctggtctttccccgtgttgtaaacaatcccctatgtttaatcagaatttaccatcatcatagcagaaaataaaaccaagaatgtgtcttacaatgggagcattttataaaagacgatacttaaacagcgtttcctgtaatagcaataaaacattttcaagctcactctcagctgaggaagggaacttttaccctgcccagaactagagttgtgtgagaaagtgtatgtgtgcatgtttcaaataaccaaactaataagtcttatttctctccttattataatcaggggaacaaccattctaataaaattgtgttcaacagttcctctataaactcactccctcatcctagctccacctggtataatataaaatctaatatactttggaggcatttttaataaaactttttcagatgactctatgtggcaacacaattcatttatagtttcctattagttcacctttatagaggttttagtcttttctatctcatggggtaagtcactttttttcacagccaacatgtagttctattgatctaatcttttttaaaagttttgaatgtaagaacaaggttgggataggaggagaaattagctgactcgtaccactgtgatgttaaggttgatattttatgtggattttacattacaccgacatcttttattataaggctatctattaactatgctatttatgaaggtagggaaaatggaaggagatacttcatgatttatttttattaaaatagcttcaagatcattctgtattattctcagggtcaaaatagtgttattcattcaaagtgacttcttatgaaggtaatatgattcaaggatggtgataatttggaatgacttcatggcaaaaagacgtagtgaagcctcctgtgagcatgggagaagggagtattcaaatgaagaagggtcacttttaatcaatggctgaaatctggctgccagcattttgaagtccacacctgtatttgcatggaggtaccactggattgttggactatggtggtgcttagtatcctgttcttaacattcttctccttgggcctgtgaccttatagatgatagtcagcaaagtgcaaagttgagaagcaactcactgcatattgaagaatcccccaaaatctatggaattaaagcatcagatacctctgcaagactggttatgcagtttgtgaggctcagtgcaaaataaaagagcagcccttttattttgaaataattaagaatttaaagatggtggcagtacagtattaaaccaagtatggggaccttctaagtgcagaaccttatgtgactgttcaggttgcacacccatgaagcttgcctgccttcagacacctctggatgtgaaggctaaagtaaagctaaaaacgaaattctacttaagtagtgagacatcagattgccatttctgctctacacagatgggctggggtctcctaccagcagaaggctgaagttgagcattcagagtatggccttggatattctactatttgctgcatataaattcatttctctaagcccaagggtccttgtttctaaaataatagtttaaagcagatcttccagatgcttgaaaactgaacttagtattctctttttttttttttttttttaagaaggagtctcactctgtagcccaggttggagtgcagtggctcgatctcggctcactgcaagctccgcctcccgggttcacgccattctcctgcctcagcctcccaggtagctgggactacagatgcctgccaccacacctggctaattttttgtattttagtagagacagggtttcaccatgttaaccaggatggtctcaatctcctggcctcatgatctgcccgcctcggactcccaaagtgctgggattacaggcatgagccaccgcacctgaccttactattcttaaaaatgttcaaaagcaagacaaaaactttcaaaagcaacccttggggggtttgaggtggcttcctgaaaaagttggggtataaagaggcataagtgatcaatatttttctctagtgatggctatgatttctctcaaaatgtagcagtgtattgaagtagaacatggaagttatgaaaactctgagatgaggcagatctgaaatgaacccatgctctgtccattacaagctgtgtcacaaaacttcttgtacaatgtggtcagtaatagtacttacattaacgagttgttgatatataagataatacatgaatggtacttctttggatgcctggcacatagtaagcattcagtaaatggatgtggatgaaggcgaagaaggagaagaggaggaggaggaagagaaggaagaatatgataatggtagtggtggtggtgaaaatggaagccatggttattaagaaagtgggagctgaactggaaccagtctgtgctagaatcttcttatcatcactacttgtaagaccctggacaagtaacaacctcttggtgggttcctgtatcggtaaactatcactgagtaacaaaccacctcaaaactcagtgacttaaaatgactagtatttattcttgttcatgtgactacacaagaggcagctagtcagctgggaacctaggcttcaagttgccgatctagctggcctgggttctaggctggcagctgggctcaggtctactttccatgtctgctatccccattggatctgcagtctgactggagtgtattctcatggcaatggtggaagcactagaggaaaaactccctgtgcaaatccatgtcaaggtttgtctgacatatggctatgaatatcccattgaccaaagcaactcacacagctgagactcaagacaatgaacagggaagcatgcattacatctactgggaagaacccctatggccaaggggtggatacagacaaggaaaagaactggggcaatgagtttctttacatggaatatggtgctaacaaagtgacttcactcatagacctgttttgagcattaaataagataatccatgtaaagcatttagcacagtgtaggcacataattggcacttaataaatgtcagctatgttagtaatgaagattctcatcattctatgaccctaatgtaatgaaagattttacacaagaaaggcatgtgtagtcaggggaagttggaaaatgttggaataagtttagtggtgaaattttagccaggccttagaaaaaacgggcagaattttcatgaaaagaaggagggagagggtgtcactgaatgacaaagaacaaaaacaaaaagcctagaggcaaaataacatggatccaaaacacggattgtgtttggagttttaggtgaattaaccaccctttatttccatcacttttcttttaaaatccttgaggtgaattgtcattcccaatcctgctgtttgtttggaaagagaacagagagtacacttataataaaccagctgtaaacctgtgttctcagcttggaacttcctccagcacttcccctccctgggcaggtgctgcttcccaggggtctccttccatcctgaatggaaagcttgtctgcagtaatccaagggtgccaggaattaggaaagacgccttgagggctcgatcctgccttatagccatgaagaatggctattgcttatgtgcaagactccaggaagagccctgagtctccatgaattcttttgttctccctgagcagcagggatttgaagcagaggaccctgttagcaatgaatattgtgagcgcttctgtccaagcctcctgtatatgccacactcaactttcccggccctgcccttgtggcagcctgctgccttgctcgcaccctggtgtgctgattaaccaacaggggcagagagcctgctgctgacacagcccaagttgtccaggcctgttagcatccccctcaatagacacagcctgaaaaaaggtgaggggctttcctcccctcctaggaaacatatgtgtactctgagggtgtgcttttgaagacaaacctttagagaaatcatacatagaataaagtcaagcttggaattcttccagctttaacatcatcctacgtctcccttttcatctcacctcaccctacccaaggaagcatggtttgaaacctcttcaaatgctttcggctttcaactctagccttcaaatggattttgacaaattattgttcaaaaccattttatctggttattcctgtctgtatcgatgcttttcagagtggttgtgtccttacacacattaagggatgcaagttaaaggagatggtgatggctgtccagttatttaacaaatattcagtgttgaagatgttgtagtgtgtccctcagatctcccctttaggactgaggcactctttcccctagtggctgggactgttggcagctaacacctctcagccttgtatctctctgatcactgttctcaggtagagagaacgctcatctccaaaattatgctcttttcttgggaacagtcttctccagactggtaggtaaaagggaaaacaccatgcctcgaagtgggacaacttaaaagggctgtcccaacttcagagctgtcttggggttagttgaggcttttgttgtaacccagtcctcttcttagtcctattatcctcattcaaccatgtgtattgatcctgggaacactttgcagtaacttctttttttttgagatggagtcttactctgtcgtcaggctggagtgctgtggcgcaatctcggctcactgcaacctccagctcccaggttcaagtgattctccttcctcagccgaccgagtagatgggattacagggacacgccaccaggcccagctacattttgtatttttagtagagacggggtttcaccatgttagctaggatggtctcaatctcttgacctcatgatctgcccgtcttggcctcccaaagtgctgggattacagacgtgagccactgcgcctggcctgcaggaacttctttacacagatatctgccttaaagtcattttccttagaactctgatctaggacatcggctgtgggccaggcatggctctcggcacttttcataccttagcccacttaatactcacaactgccatccttaagaattaaggaaaccaaggtcggggcaggctaactaacttgcccgagcttcctcttagtaagtggcaaaaatgtctgcctttctccaaattccataatctgtatgctgcctcaccattttaaaaacagcaaaggcagcttaaggcatgcaaaaatgtggaccatttgttgaacaaatgaatgaataaatgagatgtcaaagcaaacaggaaggtggtcaaatgtacagtaaaatgatctttctgtaggaatgtcagggatgagtaccagggaatctacactgggattcagctgtgtatgagtgtgtctgatgcacggatagatctgcggccatgggtaaaatcaaaaccccataagagagctgcacactagattcatcaaagtgagggtggaaggaggaagagctaccacacttaaatggaggtatttgagaaaggaactatttacaagagtgtagacagatctaaaagaaacttacaagggacggtgaagctttctgtgtctgacaacagcaggcagccattatcacctgtaagactgaatagactttttggaaaatattttaatacttgtgccaatataattcatatcctttgtaatctaatgtattttattttgtgcatttaaagctatttggaaaagggatacagggcttcaccagattgccaaagggtttcatagcaccaaaaaagtgaaaaactcccatagagggcactgggaacactgcatctaccttcaagaggctttcttcaaaaagtggagaagacagaatggtgcagagggcgcactgggacacaaagcatggcaggataaacctgcctgaaggatggaaaaagattgcatagaggaaataatacttaaactgagttttagaagacaggtgcatgtccaccaggtgggcaaaagagtggagtaaatgcaagaggctgctagagagggaggaacatggaaaaggagaggtctctgcagagaaagcaagttacccaaacacgcaggagcaacaagatagagaggtgacagcaggtacagaaagagttgagaagaagccaagaaaaagctgaggtatttccgtgaacttggagaactgttaaaggactccatcccaggaaggacacgatcacatctatatcaactgtagaatcatcacatggtctactgtgtagagaatgaaagaagaatgcaagggtgggagataaggaaacacattaggaccctgttgccagaatcaaggctcagtgtcacgagagcctgaagtaaggtggtgcctgagaccagcatgtgtggcccacttggaagccactgaataatgcaccagaacacaccaaaggctttctgcgactctcttccaaaggcgttttctggcagaaggaggatgcttggcctgtgtatagaccctcaaggcactaagggagataatgtcccaggagcaaccctcaattaatgagggatgggagtaggtggataaatactccagcttcctcaccccctaggccaactctgctgaggcatgttcagtgctgtttcttagaggacaccagtgagggtgagcttcgcttgcccacagtagtaacttgatgtcttcctttctccatatcgtttctccacattctcacagtttttcctggaatcacctcccaaataaaccacttgaactcaaacctgatttcagggtctgatctgggggaaatccagactacaacaggcagttttagtgggtctggagagatgagaatgtaggggaaaaagctgtgagagaagtggaattacaggacctggtcgtttatcaattgcagaagtgcaggaataggtggtatcaagcatgatgtcagtttttctttctgcttgtgtgattggtagaaagatctgcaattctctgagctggagatgacaggagggagagcaaactgtggtgggacggcataatgaattacgtatgggcaccatgagtgaactacccctacgactctggacggagatgtccaacaggcagttggaagttcagaggtagacactcatggagtgagttgggctggggggctttacttggaggcatctaggattttgatgagatttttccagagaaagtctagggaacttaaacttagaccttttgaacaggacaactgtggaaggtgctgtctttcaagttggcttatttcctgcctaattctgactctgccacctgccccttacaccctagttgccctgaactcagtcgaaagaattttcccgtctaaaacttcttctggcaatagaaagtcacgactttttggtttttctgggatattattgactgtgattgtgttgacaagagtatgtgcctttctcttccttgttttggtttctacaaaagcaagtattatttgtagagtggacatattatttatcatccaaatcaggatacttttgagagtaaaagagagcactagttataattatagttataattataccacagtattaagcatcaattgaaactatcttaagcaaatcaagacatggttatgctgattatctaattaaaaatgtagaccacctcgaatctttctacaagtatgtggatgtaaaaataacacacagggtgaaagagaaagacagagagaaagagagaaaaaaaagggagggagagagggaaacaggaagattaaggataaatcaaagatccattttgagagtcctttgtggcactttacctaaaacagttttttcctcccctttctctgcctctttcttatgagtgcatatagggttatttagctttttatctccagcctataacccagtgcctcatatacactagagagtcagtaaataatttttaaatacatgaatgagcaagtttctctattaaaattctcctaaaaattccatttccaaactactctggccaatatgaaatttttcctccactcaaatcctatgtcatctctagttttaattgcataattaaatatttaatgaaatgcttttctattttgttgattaatttaggcatggggattctatctctattatattggttctattaaaatgtactcctggccaggcatggtggctcatgcttgtaatcccagcactctggggggtcgaggcaagcaggtcatgaggtcaggagttcaacaccagcctgaccaacatggtgaaactccatctctactaaaaatacaaaaattagccgggtgtggtggcacgtgcctgtaatcccagctactcaggaggctgaggcaggggaatcgcttgaacccaggaggcagaggttgcagtgagccgagatcgcgtcactgcactccagcctgggtgacagagcgagactccatgtcaaaataaataaataaataaaagtcctcctttggtattttcttctgtaaatggggatgagtatagtgcccatctcataaatttcttaagcttattgtgaggattaagtcagctaataaatatgaagagcctggccaataataagtgcctattttatgttagttattgttatttttattatctcttccagggaagagatggggccattgcacttactaatatttgaacaaaaaatagtgacttcattatttaatgacttaaaagcatgttaacccaaatatggtaaaatggtcatgtctggtagactcatgaatgacattcaatgtgcagtgataccagatttaaaaattatttttccctgaagcactctaatttcaatatttgaaactatgtttgtggggtattcagttttctttactccttcatatgagagcgtattggctatagtgaagtgggtggggaaaaatgcctggaatttaaatttgaaaaccatagtttaacagattttcatgggttttctgaaagatgaccttcattcactgctgttattaatattctttttttggattttataatataaaagttaaaatgtgggccgggtgcggtggctcatgcctgtaatcctagcactttgggaggccaaggcaggtggatcacttgaagtcaggagttcaagaccagcttggccaacatggtgaaaccccgtcgctcctgaaaaataataaaataaaataaaataagctgggcatggtggcacatgcctgtaatcccagctgctcttgaggctgaagcagagaattgcttacatctgggaggcagaggttgcagtgagccaagatcatgccactgcactccagcctgggtgacagagtgagacttcatctcaaaaaaaaaaaaaaaaatgttaaattgtgctagcaggtagcattggcaaaacttctaatttatccagaaatatgaagcttggcagatcttaggcaagtgtgtcaaaagggtacctagagtagatttgacttccctgcttaaggaagacttcatcccctcatgtcagagtttatacttgaagaccttgcattgcttggtccttagttgaaagttccccaatccaactttcagccctttccctttggaacacattcagtaacacactggtccccggccccagtcctctcatctgtaatggaggcaagtgccatgttatagcttctttatgactcttgtcatcttctttattccatcctgactttctgacctgaaatgttggcagtatttgaagatctggaacataagttttgcttcacttaaacctggtttctcattgactcagggttctcttagactagcactgttcaatggaactattctacaaggatggaaatgttttatgtctaccttgtccaagatgttagcccctaggcacatgtagttactggaatgtggttagtgtaactgaataactgaattttcaattttattttaatttaattaatttaaatagccatagatagctagtcctatcatctcggacagtgaactaccttttccttcacagattttatctaagttacagttcctgaggaaaataaaaataagcaaatatgctatttatttatgatgacaatcactgtttaaaccacatgcctcaatagccaccaagacatttaatgaaattgtgacatacactagaatgttgacttaaatcaaagtcttcccttgactttgataatgctgtcaacctcttgcttttagtttcactcctttcatctctttaggtacatactgccaagtcttaatgttggagatcctcagaaataagtcaaagaccatttccctttctagctcagtattctgtttccagtttaccgcaatcatgcctatagcttcagtaatctctacatcaatcacttccaaagttgtatctttaatacacacttctctttcaggctttctcaaatatagcatgctcagaactgaatgtgtgaccccctcacaatcttgttctttacatcactgaataacaccaatctagatggtcaagccagaaagctaagaaccatccttgacatctctatctccttccattaattcccatgtcaaagtcatctccaactccagttgttttcacttggaaaatagctttcatatccattcacctcacttaatctccactgttgccactatgatctaagttaccatcgtctcttacctggatctcctgctggaagtttctatgtgtccatagtcacacagacctatatgaacagagttttgtcacgtgtcatgctccctcaagtctcagagcctttataatgtctctagaattaaggttgcccaaaataaacttcaaattcacaaccctcccctcctcctctctgccctgtcccgctcaacacctggttcctggttcatcttgaagttttattcagatcctaaatcagatgtcacttccttaaggttagttttcttgattccccagatcatatctggactctgttacacattttcctatcaccttgtacttccccttctgagcacttatcatgattataattaattatctttaatattgtctctgctgttaaaaagataacttccatgaaggcaaggatctgtttgtcttattcatcacttgattcttggtgcttgagtaagtacatgcacatagtaagtgctcaataaattgattccttaggtacttaatgtgaagttaattgtatattcttactgcctaaggttagtaagctggactgtcactttatatgtaggttaggaaattgacaggaaaatgaatttggtaactgttattcacatttaatctcaatcctcaaaactgagtttctctgtgaataaaacaataagttactggaaatgtggagttttcaaaacaaactcttgatgtaaacttttatacttctgttattgcaggtgcaaactttccagctgttctgtgatattttaaatgtgtttcaaattattcatttactattttgagtagttcatcttggatataaatatattttaaaattagttaacttattgatactactctaattattattttttagaacaatgttcttccaagagaccttgtcagagactcaccaatgccattaattgaccatggttactgaattccaaagagtcatcaatccttcaggaataatctttgggatcagttgtcattatttatctagcatgacaccatctacgagctatgttattcaaaagtggaaccttttctatttcctgtgtcattgtttccaaacacaaatttgacaatttccatgcaggaagggaacatgagtgcttctggacttgtacatgaattttttgtctttacctattaattgctcaaccgaccttgtaactagcttcctccctttgatctgacactttcttatttcatgcttgcagatgtttttaagtgttctaatattccccccctggggaaactggatgttttgtggtagttgatgacatagtttgctaggccactatggctttatttcataactttttctagaaagtaaaccatttaggttgaggacgacaaaaattgtggagttatactaatctaaatgtgagatactcttcattgactttcctggttgacaagttctatctatctagctatctagctatctctttttaaaaaattgaagccatttacatacgaattacttaaaggaactggaggcttttaaagattcagaaaatcaatttaaaaaatatgaatgtccacgtttttgagaatattcaaagcaagtcacaatatcatttaaaaattagccatgtagtaaatatcaaataaattattaatgtatattaattttattgtatttagtaattaaaatggtgaaaaatcatgaaatatttatactcctctatgatcaataactatttatacaaatctttttttaggccatagaaaactttggttttctttaattaatgagttatttcaactaaacattcaacctttgtttctagaagcacacctttttttcatttcctaaggcaaattgtagtttattgtaattctattaatcatcagacttcgttactattaagcaacaactgaggaattaaataaaataaaacttttgaaatgaggaacaaccgtttccaggtgattacaacaatagtaataataacaaccattcatatattctgttagcagaatgaaaaaatgtaaatataagaccaaacttcatttaaagcaaaggtctaggtttcatatgtgcatgagaaatggaaattcaattgctaacccaaatctgaactaaagtcataatcaaactaactgaactgttccagtgtgtatgggggaggggacactggatggtttgcctactttggaggagggtgttagttattaaagccatacacttcaacagaataattactaaattcaagagattgattgaaggggccattcagattatataccatatgctattctaaatttttgaatggctattaaaaaaaaagaaaaaacacgggttcagattttttttccctattaaaatgcaccctgatgaatgtctctgggaacacacacattgtcctcattcaggcatacctgtgttctatggtatacttgtcttgaaggcatgttatttagtatggggatagagaatttagttctctgcctcaggtgcaatcctggcctgtccctttattacctcgggcatatcacttaacctctctgaagtttagcttcctcctcttgtaaaccgtaggaataattacacctaattcttcacatacctgtgtggattaaacaagataattcatgaaattacaccatgagtgttcactaagtactaatttttgttagttctattattcaccccatggactttgaatgagttctcttggttgggcttcaaggcctttacatttattgttgcaatattatcatcagaaaagggtgtagtattagcttccctatgaccgcatttggtagtgtgagtcctggtgtcagtgtatttgggtttctaagaagactagacatcaggaccagattggctgcttctgccaaaagaaacaaaccacttcaatttcattagcacagccctgcaaatagcttttcaagtagtcagggaagtaaaagttctattgagcttggggctattttgcattatctccaagggacactttctccctggagaggccacctgcatcttataatttaagagggtctctctgctaagtcctggagtttccacacagctgctgaagacagacacacattcctagcatttggcatcacaaagggagctcaaagaccaggcgggaatcttgctgtcattttgtcaattccttgtctgtttttccccaggcttccccaaaatttccattaatcttggagccaagaaatacaacacaatcagcttatgcagtagtctttgaaaaacttaaactttttatttagaggtaattgtaggttcacttgcagttagaagaaataatatagagaaatcccatgcactaagcatcctttaccaagtttccccttatggggaagttaagatacaaaacaatctcatcaccacaaaaattcctcttgtttagcttttataccatatctccctcccatttcaccctctcccccatctccaatccctggcaagcaagcactaatcgcttccatttctataattttgtcattttgaaaatataatataaattacatcatacaatgtataaccttttggcattatcttttttgattcagcataatgctctggagattcatcccagatgtgggtgcatcaatagtttgttccttttcactgctaagtagtgttccatgatatagatgaaggacatctggattgtttgcaattttaggataatatgaataaatctgttatgaatagttatgtgcaggtttttatgtgaacctaggtttctgcttctctgtaataaatgccaagagtgcgattgctcggtggtattgtaattacatgtttagttttatgagaaactgccaagctgttttccagggtgactgtaccatgtacattccaccagcaatctatgaggaatgtagtctatctgcatcctctccagtatttgttgttgttactatttttaattttaggtattctgacaggtgtgtagcaatacctcattgtggctttacttggcatttcctcaatggctaataatgctgaacacccttctcagcagtcttttgcagatggtatactttaagagctagtatgccgtctgaaaggggtatccactttggtaattgagaccaaaattaatttgtctggatgcgaatcaggtctgaaaaagagagagagtgtgtgagctgtagtatgcttcatcttgaactcaggtttcctgaatccaagccaagtgagcttaaccagaccctaccactagtatacatcagagatgatttacttgctctgaattgggtggtaaaatagagcagtttgatggccagttaagaatatatgagtaatatagtgattctctgtgtaatatctagcaatttagtgtctactgggaaatcaataaataattgaatttttatacatacattttatatatatgtaaatttacatacatatatgtaaatatctgcatataggtgtatctatgtctctctagctatctatttatctagagaggagatgtattcttccaaaaaacttacatctttttttttctaaagtaggcacattagaagttttgtttcaccatttacagcagggaatatattaagaacatagtgttcttattatctcaagttaatctccaatgttggtagacatcccttaatcaactatcaatggggacaatgctacatcatcctatttggagaagcctcaaataggatacatcgggaagaacaaaacatcactgctattgtatttctgcccaaaattcacaaacaaaatctaatgataaacaatcagacctacataaataaagggaaatttcatagaataacaggtctgtactctcgaaaaaaaatcaaggtcttgaaagtcaaaagaagagcttcaagattaaagagagctaaagagcctttgctcagaataaagactactgcagagatgatgaacagtatgtgtgactgagacatccaaatcctcagagaggctgcattgcattattgagaaagttgatgaaatcaaaatatggcctatgaattaattacatttaagtttccttgttttcatcattgtattgttttaatgatctttgtatgccttatgtatgggcacaaagtccttgttgctaggaaataaacactgaattattcagaacataatgcctgcaacttactctcaaaaggttcaagcactacaaaagtgtgtgtgtgtgtgtgtgtgtgtgtgtgtgtttggaaagacaggaaataataaaggaaatcaagtaaaatgtaaactatttgtgcatctggattaagaatgtgtggaagttttttgtactattcttataacttttctctaaatttgaatttatattaactaaaatcccctccacccccaacaaaagaaaggaaacccatgcctgttcaatgtattctgtagttctcattaagtattaatagggtcagtaatgaaggtcctggtggaagaaggagttcaccctcttaatatgcagatgaggagacagaagctcccagaagtggaataccctctcaggtgcttcccaggagggtgatggaggagctgggactgaaggtgccttctgatgctttccagtggcccttgcttgagctctggctaggctcacacacagagcagggaaaatggtagtcaagggctctgtttacagtgagagactttatggggagtgggaggagaagtgaggtgaactgagaattgtagaaaatttcagaggttcagaatttacacatgtatcatgactccttactctgctctgagagatgtcacaccactttgactttgctaagagacacactctttctatttgaacctaaaaaaggacaaaattctgatgaacacctccaaagccagctgttgtgcagacccagcttgtagatggagtaaaaataatccaaaaacgtgctcaatacaggaaggggtaaacaatgaatgtatctaattcagaaggaaggtatttcaaaggcaggggctgatgtggccagtaaaagaaatagttacaagatggaatacgtactaagtgaaatgcaccccagaagtaatctcaagtaagacaggatatttattttatatttatagactcatggagaagctaagcctttccgattgtgagcctacactggcagtttcttccatgtgcagatagccctaagcacctgcttgtagacattaacaggttaggagacatgcaattaatagctggaaggtcatagttcctgaggtgatctccagagctgaactctagtgctgagcatgacagctagcacagtttactcaacatgttgctgtttaaatagacttcaatatgctttctcgtttacctgtcacagaaaccctccggatagactatcttgagagaggcagggcttgagctccaccacttgatataaaccagcgctcttttcatcccaagatgaggcaaattcccagagatgatctccccctgcacccagtgtatttacagaaagggtgaaggccaaaagttgggcccttgaaaccaaagagcaaatgtattgccacccctggaatacaggatcttttagatgctggtgtctcatggccattagaagaagatattttaaatctaaatattggaagaagtaaataaggatctactttcaatcattcaacaaatatttattgagcatttactatgttacaggcacagtgcgaggctacgcagacacaaccttgagcaatacaggtgtgcattttgcacttgtggtacatataggctaggggacaaatagataaaagcaactctgcagcatgtattctaaagaagaagcccaaagggacaggaggtgggatagcaggggtccagctctgtcctagagaccaggaagtcctcctggaggaagtgagatagaaggcctggggtggggatgggatgagaggagagagagcttttcaggcacagagaacagctaaagaaaatatatatctatatgacttgtttctgtggctgaaacagtaaggactttaatgggaagtgacctccaaccacaccctcacttcctcctaaccacgaacacactcatttttcccattcaaattcccagaaatgctattaacaggaatcttttaccattattttcaaaagtagccttgaaatgatttattttgtcaagttctcagcagagagaactgctaacactaattaaatcagaacctcaggcagtggtaccaggcatgagtattgtttaaagcttcccaggtgatcccaaagttcagtatagtcaagcttgggactttaaacccattcttgattatggacgctggttaagacagggagaaaaaacaactctggcactgagaggtgggggggaatggtgaagagctatgttctagcttctgaggtttgtaaaatatgttatggaagtgaagtgagtgatgcccagagaacccaggataatgtcctcatttggggtctttataaaatttaattttgagcatttatatatatatatttatttccataggtttttggggaacaggcggtgtttggttacatgagtaaattctttagtggtgatttgtgagattttggtgcacccatcacctgagcagtatacactgtacccaatttttagtgttttatccctcaccccctcccaccatttcccccaagtctccaaagtccattggatcattcttatgccttttcatccttataggttcactcccacttatgagtgagaacatatgatgcttggtcttccattcctgagctacttcacttagattaatggtctccagttctattcaggttgctgaaaatgccattatttcattccttttttatggctgaatagtattccatggtgtagataaagcacaatttctttatccattcattgattcatgggcatttgggctggttccatatttttgcaactgcaaattatgctgctaaaaacatgcatgtgcaagtatctttttcatataatgactcctttcctctgggtagatacccagtagtgggattgctaaatcaaatggtaattctactttcagttttttaaggaatcttcacactgttttccataatggctgtactagtttacattcccaccagcagtgtaaaaatgttcccttttcaccacatccctgccaacatttattattttttgattattaccagtctttaaggagtaagatggtcttcaaggccaaaaaacccaaaagcaaatgcaacgaaaacagtgacaaataggtgggacttaatgaaataggaagtttctgcacagcaaaagaaacaatcagcagagcgaacagacaacccacagagtcagagacaatgttcacaatctatacatctgacaaaggactaacatccagaatctataaggaactcaaacaaattagcgttgaaaaaaaaaaacaacaaacaaattccatccaaaaaaaatgggctaaggatgtgaatagacaattctgaaaagaagatatacaaatggccaataaacatatgaaaaaatgctcaccatcactattgagcatctgtatttgactatgaaaagattgagggctagatgtggtggcttatacctctaatcccagtgctttgaggggctgaggcaggagcatcatttgagcccagcctggaatttgggaccagcctgggcaatataataagaccctgtctctacaaaaaaattgaaaacattaaaacaattagctaggtgtgtgatgtgcacctgtagttccagctagtcaggaggctaaagcaggaggtttgcttgatcctgggagatcaaggctgtagtgagctatgatcctgccactgccatccagcctgggtgacaaagtgagaaccctgtctctaaaaataaaaaacatcaggagctcaatgttcaggatgccaatgcagacttttcactgttgttgctggagaaggaagaggggagtagacggtgtgagccccggagaattctcttctggcaacatcttcctgtagaaaacagtgtgacaaagctgtgaatccccaaaattcattccttgataacaattgtgtttgcactacatagcctgaagcaaagctagcagaggtaatagctgttgaaaaaaaaattaacgggcacgatgactgatctatagcttcatcataacataaattataacaggagacggagggaatggctttttggaagtcctgcttttctgcagaggtgcaaggcccttgctgcttttccagctattgttaagtttgctaaaaataagatctgtgcaatatgtaaacatcaccccgccccaagtaaaaatatggattattcagatgctagaggcaggagagagtcagatgttggcctaaggccttaagttcatgtccctgacaggctctgagcttgtcaaaactgctcttcaatccccttgctaatagcatggtgtgcttcagtaactgaattggtcacgtaattagcatactcctctggctgggaagaaatctgcgggtacactctaaattaaagaaaaccaacttgttgtgccaggttatataatttaatgaagaatctgtagacggtgccttttaaaaagtatgattttgggtataaaattaagcactcacgcctaacgtttctcttttagctctcagccaaggctcactgttgtgtaaatgaattaaatgcagccaaaggcccatctgcttcacaggacagaatcaaatgagacctggatgcttggggtctatttgcccttgttttgtagcatcttgggcaaaccagcactgatgtgcaatgtgagaggcgaatatttctgcttttatcattgttgtaagccacatatttttttcttacctcttctctgtttgttctttaaacaacaaaaaatctggtggtagatccatctgacctcactgagtccaaaatggcatctccctctccttgttcttcctctctggccgctcctttatttttcttcttttctttttctctttcatctggcttctccacccaaaaagccaagggaagtgaggtaacaataactttgttgcatttcacctggcccacccagagaaaatctatttctaggcaaatgcggaaaacccaaaccttgtggaacgcaaccggccctttaatctaacatcctctgtgagctgcagagtctaatgtttaatttgaaaaacaatctgaaaatagcatgaaaggaaacgtggaatttgcatagctatatatatgtttaagatagtcatagtcgttttggaaaatactgtgtttgagagctgaccctttacttgaagttgcccgaattttctggactcctctgagataaggagtgtaattgtcagttgagtgatggttgcttttctgcacagtcgtcttgatattaaggagtcagaagtccaagcctgtcattttggaaaactgaatgctgatattcagagctgtttgaatgaccaaaactaaagtcacaatgacaacgaggttctagtttatttctaatattcattggattgccacgcttttgagaatcttgttaaaaatcttctgttttctcttcctttccttttatctttcttccatctctttctctccttttctttgccattttcatggccttttaaaacatctttttctgcatatttcttttttttttcaaagtttaaattgcactaaaatctttatataggcatggcctaagtttggtttattccagcccagttgcctacagatgaaatcctttctccataagccctttgaaggacaacttccatttccaaagccttaaatttaatagctggagaaaagacaaacaaaatctctactgtttcaggcttcctaacatttctaccatattcaaggtgcctttaaaacaatctttctgaaaggtgctgggaactcagatatcaagcataagctcttcatttggtgagagacgctcagcaggttaaggagacaaggcagagagtgcagaggtgtaaaaatttaagggtgatttcaaaccagtatatatgcctctaggaaaaggattttaatcttgggatccatggatcgaagtcaaggagtttgtaatagtccattttctgttgcttataacagaatacttgaaactggataatccagaagaaaaggaatttatttcttacagttagggatgctaataaatccaatgttgagaggccgcatctaatgagagcctccttgctggttgcatggcaaggaggatgactgtgcacatgggctagctcaggttgctcttccccttcttgtaaaaccaccagttcccctttcatgataactcattaatccattaatccatgaatggatggattcattcaattctcattgaattgagcccttgtgatccaatcacctctttaaggccctacctctcaatactggcatattggggattgagtttcaaaaagtgtattggaagggacattccaactatagcagggtccatgaacttaatgggaaaacattacttctttgtatttcctaagcttttgttgaaatatagcttttctaccaattataaatatggacaaataacccacggtaatgtcagcattctgtaacatattacaatacagttgttgatgtagagacatctggtctcaacagatgctttacgtccaacactacttagatattatggtaaatattagacctaccactagatctttctacttaaagcgttagtaagggagcacatgcctcactacagcaattaaaaatattattatagatatgtgggagctaagctatgaggaggtataagaatcatacaatggacttcagggacttggggagaagagtgtgaggggggcgagggataaaagacaacaaatatggtgcagtgtatactgctcggatgatgggtgcaccaggttctcacaaatctccactaaagaacttactcatctaaccaaataccacctgtacttcaataacttatggaaaaataaaattaagaaaagactataaatatttcattattgatgtttttcttaataattctatatattttatttaatgcatttaaaaattgttattctgagaagcagtcaacggctccattgaattgtaaaatgagtccatgtaacagtaaaggttaagaaccttggctcttagaggaaattattcttccaactggatactttgtggtccttgattttggagaaggggaggggtataaaggaagaggagaaaaggaatctggaatttgttttggcctaacagagcttctgattgtttctgttggttctgtgtccagagctaaacacctgcatagcaatttaaaaatgtggagaaaggaagaaagaaaaaaacatagtttacactagacaggggcatctagggcagcaccaaaacaaaatcctggccaggtgcggtggctcacacctgtaatcccagcactttgggaggccgaggcgggcagatcacttgaggtcaggagtttgagaccagcctggccaacatggtgaaaccccgtctctactaaaaatacaaaatacagccgggcgtgttggcgagtgccttaatcccagctactcaggaggctgaggcacaagaatcacttaaacctgggtggcagaggttgcagtgagccgagatcgcgccactgcactccagcctgggtggcagagtgaaactgtctcaaaagaaaaaagaaaaaaagcaacaaccccacaaaaagtctcacagcaaaacaaaaaacaaaaaacaacagccttctcacgttttcttccctctttttggacaatttttttttctggtgccaatacccaagctgcttttccttttttttttttttttttcagcagtgttagaaatgtagttttacatatattctagaagatactcacgcatttcaatgttactttccataggaggaacttgtaggcaaagctcctgtgccattgattgagccctttttccaaactgtcacacactcacaacttttcctgcctaagtctttgctgatgactgtaaagtcataataaaaggccagcttgccatggagattgctattatctgtgggagaagttggtttatttgcaagactatagaagagtctatgaacttagatgggaaaataatatttctttatatttcctaagcttttgttgaaatgtaccatttccatcaattataaatatggacagtaaacccatggtaatatcagtactctgccatgtattacgatacagtggtattgtcagtaggggctagaggtataaactgacagctactgtgtatgctaaatttccagctgtgaaccacattgactttgggagttaatagttgaagtaaagtgtatgtaatgagacatcatgtttttccagagtttctgttaaaatagtctcatcagagtaatattgagaggaagaggccctgtcagaaagagttattttttgcttctatgatatcttttgattctgcaaggtggtggaaaggagaaagcaaggaggaaagtgggaagaaaatgtgggcagtgaactttacggggcctgggggacagacacagactttagtcaaagatagctagatttaaatctcagctctgcaactttcctgtgtgatctttggcatgtagcttaacttctctgaactaccagttcttcatttgtaaaatgaacataatagtggtatccacttaaagagttatcataagaatttgataagctaagcatggtggctcacacctgtaatcccagcactttgggaggccaaagtgggcagatcacttgaggtcaggaattcgaaacctgcctggccaacctggtgaaaccccatctctactaaaataaataaataaataaatacaaaatacaaaaattagctgagcatggtggctcacacctgtaatcccagctactcgggaggttgaggcaggagaaatcacttgaatctgagaggcagaggttgcagtgagctgagattgtgccactgcactccagcctgggcgacagagtgagactcatctcaaaaaaaaaaaaaaaaaaagacagaatttgatggcatataatgcattaagacatttgtcacagtgcatggtaccatgtaataggaacttaatagagggcagcttctggaaggctgctgctgtgaccagatgagtatgtcagctgagctgtcagaagtgacaagactacgagcagctgctgttttgacacgtctgctatgtttgtctctgtgatcaaccagcaatcctgtcccactggggaggggtgttcttggcattggtctgccaacagcctgtcctccttcctttactcttaataatcttggtttttttttttttttgaattaagtaactgactgtgtcagttttgctaactgaaaaatcagggtcttaataatagttagcatttacctgcctcacatgctggattaatcagcgtgcttgtgaagtcacaaatttcttaaagtcgagatagtgactctgctactcccgtaatgagggtgtgagcactgaggtaagtgtatatatacagattcatatctgtacttgagcttttgttcatatgtagttaatgttttaaatgggataattgtttgactgataaataagataattcatgtgaaagtctttgtaaacagctaagcattagtaaaagccaaacttcatacttattaaagttgtgcccgaaataaaaatcatgtaacagctggaaaattaccagctatcaaggaagaagtcaagtccctggggagtaaaaggggctaggagaaccctaagctttagacctggttgatcactaaataaccagggaagttactgctccatttataatcttatcttcctcttctgtagaataaaaatactgtaggcttggcctatgtttcagccttcttgagaatcattctcggagaatgatgctaaaaagtgcttgatgaaaagtatggtaggtgaaattttgggatggtcctctacatatttcctgcttcttcccatagttggtaatataaatctcattcataaaataacactatttttaaatcgatttagttcttagtaaggacctttttaaaaaagttcagtgagtggttaaaaaccctcataatggtctctagcctcctgccgtttggacctggactaacttaaaaatgatgcctgccttgcttctaattacctgtgtgtttattgcaactaataaatgtattttatacaagttattattttacagcttagatttagctgcttatttgtttagaaaaaagtttgataacaacaaaaagcatagctcatctcctcatggactggggcattcatctgctttgaatgtggagacagaaaccttatagacagtttcaatttgtcttacatttattgtgtacacaactgactggtctagacactatgaagacaacagagggggtaagatatagttctgcctttaggagtaaaatgatcaatcattctctaaaagactgtccgtttgccaaacagcaaaaagaaaccaactggttgctaaatacgtgattttcatttgcctcatatctgcactggcgtccaacacggaagcagtaagtatgtatccacgtgtgcagaatgattcgcccagggctagtttaacaatggctattattcacaataataagctagtttgcattgacactcctaattcaaagtgatgtcgcgcctgctttcaaaataggtcagcttgatagcttattggcgtagtcacccttgggaaatcacaaagagatagctctttaccaaattagtggctgatatccaggcttggtttgaaaactgtgctttgagggagacttgtttcttgtgcttgaccagaaaagcacagaaacactgaattataatgtacagcttttaaatccaagatttggctatacatttaggatagtttatgcaaaactggcagaggttggtttctagctttttttagtttctaggtttgatcatttccctctggttagtgtggagagaactaaagccttctgttctgaacaaacaaccacaacccaaataggccaagagactaggaaaataccaggacaagtgaaatgaggagtgtcctttagggcagccaagctgaggcacagagcttaaaaccaatgctagggcatgcccgagagatttcttaagagggctgatggcacttctttttgaagctgtaaagtagtggctgtttacattaaggcagaaaaaatgtcaaatactatacagctgtgtctgtcatgctcttctgctattttttcctctgtgtaccattttggtaacagtttcttcatttttccctggggacccatttctttcctattttcagatcctgaagtttggatgggacttacagcctctctttgcttccaccaccaccagtgatagtcacatggcccatacttgaccaatcagaacactgtatccccagccagaatgattagtttggagtatgctcctggtgtaccatacaatcagagagcctcattcccagggcttctgctagagattttagggaagaggtgctctgttctttctagattagatgtaccagcagtatgtaaacctaacattcctggagaccatctttgtcaccacataaagggatctcctctgagaacgacaacaatccagaggaaaatagaattgagagatggtgaggggtatactcctgataacaccaattgagttatattaaaaggggatctaagttcagctttgcctaaaccctcagatccagttaactgatttttctctttgcatagattagtttgggttatgtttctgttgcttgcaatgaagagtgctttgaataatatgtggtcttttataaagcctatgtgtcagtcatctactgccatgataatgctgcataacaaaatacttaaaaaaaaacaacctcagggacatccaacaatagtcatttctttctttcttatttatttattttctttccaatttttattttaggttcaaggggtacacatgcaggtttgttacatgggtaaagtctttctttttagtgtattcatgaggtagttgagattgggtttgtccatgttgggtttagctagagtaggttcctagcttcacgttgttcaagtgtactccgtgtgtctcttatcccttttgaacaagtggttatttggggcatgttataattttcatggtgactgaaagcaatgccagacagcaatcccaattatacaagcacagctcaagcctcttcctctgtcgtgttcactaacatcccattggacaaagcaagtaacttggttaagttcagcatcaagggagtggagaatggcactctttccacgaatatgggggaaagggagtgaatatttgatgaacaataatctaccacatcctaaacttaaccaaaggaaataaggactaggcattatagaatcatggaattctaaatctgctataaatatagtaacaaacagtatgaaatattttaaatacgttaatgtaacaaaaggctattttttaagaactgagatatgtgtattcctgaaagattcaagttctgtttcaaatattaatgatgttgaaatttgtttgtttgtttgtttgtttgttttgagacagagtctcgctctgtcgcccaggctggagtgcagtggcgcgatcttggctcactgcaagctgtgcctcctgggttcacgccattctccagcctcagcttcccacgtagctgcgattacaggcacccgccaccacgcccgcccggctaattttttgtatttttagtagagacgggatttcaccgtgttagccaggatggtctcaatctcctgacctcgtgatccgcccacctcagcctcccaaattgctgggatgacaggcatgagccacagcgcccagccttgaaattagttttgaaataagtagaatattttatggctgcctccttctggctaagggattacttcagtgatatagttatcaactgatatagacattcaatagcaatttgtgtaagttgattttgaaattcaaaatcttatatcttatatcaaacattgtacaaatatcatgaactatacagggagtgtaagattaaaggagaatagctgagtgtggtggcttgtgccagtaattccagctactcaggagacggaggcaagaggatcacatgagcccaggcatttgagaccagcctgggcaacatagtgagaccccatctctacaaaaataaaattagaaaacatagctggccgtggtagcatgcacctgtatttccagctacttaggaggctgaggggagaggatcgcttgagcatagcagttcaaggctgcaatgagctgtgaccacaccactgcactccagcctggatgacagagaaagactgtctcttaaaaaatataaaggagaggccgggcacggtggctcaggcctgtaatcccagcactttgggaggctgaggcgggtggatcacaaggtcaagagatcgagaccattctggctaacactgtgaaaccccatctctattaaaaatacaaaaaattagctgggcacggtggtgggtgcctgtagtcccagccactcgggaggctgaggcaagagaatggcgtgaacccgggaggcggagcttgcggtgagccgagattgcgccactgcactccagcctgggcgacagagcaagactctgtctcaaaaataaaacaaaataaaataaaataaaagagaatatctgaaggcataatgataatgcctgtcattcttttgggtgcctcctatgtttcaggtactgtgctaacgaacctcagtgatattaaataatgtggtcaaattcccacattctggtaaaagccagagaaaggacatctacctgaggatgtcttgtgtcaaagcttgggctctggcttcactacgttgtaggaagtttaagttagacaataaggatgagttgacagcttactaatggcaggtatgtcttctcaattctagaaaatgctgcattgataaagaaaaccatgttccagtcttgctttaaagcaggaggttgaactaggtgaagagagactggttaaagaatacaactaaggaatcagctggtacaatgatgcaaagtacaggaccttgtgaggctcccctgggagttttctgtcttgcactatgggtaaaacaattgtcctgacaattcattatgaggagttaatgtaacatgcatgaaaagatttttcatatagcatgtggctgagggagcacagttgttataaagttcaattcaaaaacaaaaaccagactagctctctgtcctggtgattctattaccaacctgtctaaaacagaggctgaatttggtaatctcttgaaatcacttgtgacccttcacttctcgggttgttttgatttggggacttttctatccacttgaagaaaatatcttttaaagggtcatactgtccccggttttgtttgagttccaacagtgagtactaggctgcctaaatgatcacagctgggcagtaaaaattcctgagaaagcagaaacattaagtttcaaattccacttgaattaatgtatctggaggtaaggttttatagttaaaatatttggatggaaaacacaatttttttaaatctttcctttgaatcaaggtaacatcacattgagggttgagcgtaaagtagctggaggcagtaacgtagtccaccccctctcaagaaaatgaaaccagtgaaaaatgtcttcttaggttttgttatgtctctgtttgactatctaacagtttacaagtgataatgtggatgatggctgtgataatatctttaacacagttaatataagaatatgattctgtttataaggcacttttcaaacaaggtaagcacaacttgaaagtaattgtatgggagggctgactccagacacgtggaggcacgattcttaattctaatttcagcctggagacaattagatttaaagcaaccaggaaaagtgcccacttttcctgggttgtgaaggggaaagaaaacttgatatatttttgtgaatctcctcctcctcttctactcttaggatgggagggtagcttcattgctagggaaggttctgtgcaaacacacaatgctgggaataatcaaaagcccagaaaactgagtcaggtacctgcctctggcaaaattctgagtgaatagatgggtgccctgagtggtagcaagcaagtgatctgtcagaacatgaaatgagaggaatttcgaagttatggccttgcccagataatattatgcctcccacttctgaaggtttcagtctaagaacccagaaaaagaacactgttttactcctgagagatctgctcagagtaacgtgggtcagaagaactattttgagtttcatagtcagagtggcatgacccagccaagttgttatttttgtgactcttgcaactcattgccctcttctttaatttttttttttaatttgaggaaataaaggtgatgagttgaatcagtggttttaaaattgtaagccttggagctcttgtagtccttagaaacctcagatgatctcaacaaccactaaagtccatcaccggtttggcagacaagtagggcaaggaggaagaactctgttctctccccttccaattcactgcatacaggacttaaaacctagacgatgggttgataagtgcagcaaactaccgtggcacatgtgtacctatgtaacctacacattctgcacttgtatcctggaacttaaagtttaaacaaaaagaatattttcctaagtttaggtttgggtgtacgactctgaacgacaacttctgtacttatcttttttactagtcagcgtacttgaccttaaagcttgctcctctctaattccaccatcctgggtgatcctgagcaccagaaccaggttcagagtttagtcattctcagaagaaacacaattcagcattataagtatcaccttaggccttaggaatataaagaacaaaagatgatccctgccctcaaggcttttatggttgaatgaggaaaatacaggcaaacctatcattatactgcaacaatgtgattgattaaagggaggccaatgtcaaggagacagggaatgtagagggtggattgcttagtccagctgagagagtgagatgaagcttcaaagagaaggagggctttgacagtttaagagaggatgtatggccgggcgcggtggctcacgcctttaatcccaggactttgggaggccaaggcgggcggatcacgaggtcaggagatcgagaccatcctggctaacacagtgaaaccccgtctctactaaaaatacaaaaaattagccggtcgtggtggtgggcgtctgtagtcccagctactcgggaggctgaggcgggagaatggcgtgaacccgggaggcggagcttgcagtgagccgagatggtgccactgcactccagcctgggcgacagagcgagactccgtctcaaaaaaaaaaaaaaaaaaaaaaaaagcggatgtatgattttaaaatataattcagatcgtgtgagtcctctgcttgaaatactccaagggctttcccattggatacagaatgaaatccaagtcctcgtgtcgttagaaggtggatatgatgtggcctgctgcctttctcagacatctgcttcatcctttttggctcttccattctcattatcctctcctcttcatccctcaacaatctattctcatgttcagcttgtggcttttatttttgccattccctttggctgaaatgctttccccccagtcttcagtgatgtgtcttcctaatcactctggagtcagaataaatgcagtagccacttcaatatttccagttttccttcttctggatacaagcgagggatcagaacttgcctgccgttttttttttttttttttttttttttttttttttttttgagacagagtctcgctctgtcacccaggctgaagtgcagtggctcaatctcggctcactgcaagctccgcctcccgggttcacgccattctcctgcctcaacctcccgagtagctggtactacaggcgcccgccaccacgccaggctaattttttgtatttttagtagagacggggtttcaccatgttagccaggatggtctccatctcctgacctcacgatctgcccacctcggcctcccaaagtgctgggattacaggcgtgagccaccacgcaggcccttgcctgccttttgatgttagggaagactaatcaggtgggttgctttggccaatgaaatatcagtgaaagttacatgtgcaacttcctggcagaagcatttcctttccagtgggagggtctatgaagtttccttcttctgatatggagactctagaagtctgtgctaacatggaagaacaatgctgagccatcacgcagtggttaagccactgcggagcctcctggattcacagacgtctttgcctaaatgcgaaaggaatgttcattgaccttagccattgaagttttagggtttgtttgttattacactataacctaacctagtctgactgataaatattcttttgaactcccagtcttaaagtagacatcctgctttactcctgctttgctacaaattatatttattttttacattgcacttccgtgaaattatgctgttcgaatgtttatttgtgatctgtcttcccccatgaaaatataaacatcacgaaagcaggtatcttacatgtcttgttccatatttgtcgtgtgtctggcacaaagtaggcatgttgtgcaccaatgcagaacacaaagtgtatctgtgccacatgggacccggtgtctaacctttggagaaagaaaacatatttagaaaggcaagcattagaatgctcccatcaatgggccccccaaattaggaaaacatgtataaggaacataagttatttatgtaatatttctcaatctcaattttttaagtcttagactctaaaatctaacaatatgaaagaatatggggtttatcctaaaatattattgagtatttattggtaacaaagttagatacaaattttttgctgagtttacaatgcacatttccaatattatagtgaatatcagtgttttcttgtcgtttgtttaaaaagtgagctttattaaaggttactactctatgtagtgtggcagagagactatgatggtgacagggtcttacatggttttcctttaagatctgagaatcaaaatgatatcttttattaccaatacatttcttaaaaaatgtattgcatataagaacaataaaaacacaaaagtggaaaagttgagaagttcaattgggaaaattattgattataaataatttcaaaaaataactggacaaactctaaacataggagaaattttaagaagtgttaaattgtctatatgacaaagaaatggaaattgtgttgaaataatttgttcaaatgttattgaattgctcatttttctaaaactacaatggccctttgaagcctatagaatctgttaacatctttagtacttttgatgcaatacaaatggtttccaataaataagctttagtttatttctcaacagtaagttttgattgaagatcttaaagatgacatttccctcttaggaagctgtgctggagttgttaactttgaacttatctaactttacaagctgagctctttttagatttagataattgtcttgcatttgggtgcttacatcctaaggtactacctccttccacctatataaggaaattttgaggctgggggcagtggctcatgcctgtaattcccacactttcataggaggattgcttgaggccaggagtttgagacctgcctgggcaacacagcaagactccatctctacaaaaatttttaaaaattagccagacatggtagtgcatgtctgtggtcccggctactcaggaggctgaggtgggaggatcacttgaacccaggagttcaaggcagcagtgagctaggattgcaccactgcactccagcctgggcagcagagcaagaccctgtctcttaaaaaaaaagttgacatgattaaaaccttatagaatcaatacaattaaatcatttgcattattgcccaggaaatgctcaatattatcaacatgattctcttaacaggaaattttagcacaaaacctaggatcaagcaggaagttacttcacttttcataattgcaagcattgctaagtgaattcctttgttccaatacaaactttggacatctttggcatgtctttccttcatgtcctcatctcagatgccacaaggagatgtacaacatggcatattttcagtcctctgtggtgagcattcagcactggttgtgtttgcatccacacaacggcaataaactatgggaactatctctacttgacgtatctgatttctacactagtgggaattccaatctttctttccatcagaagcttaaaacactgttgaatggatgaaattatcctcaggcaccatgagatatccaacagcatagggaaggtacatggacacgttggacagaagtggatttcgtgttgaactcaaagccagaggtcaaactactactattcttttgtaaagtaggattctttatgtgatggtgctgttttcctttaagatgatctttgcagcacatgatagagaggagaaatcctgcccaagggaagttagactataagtacttcacaagggagtatctacccgtatatgtgggtaattatacaggctgtgcagagtgtaggcagattatttcatgagaatattgccttgtttgtgaaagcaggaatggatgttcactgaggtaacctggcaaccaaagagataaagtaggggtgcacggtagttatggtggccaaaggcattgtcttctcagacacattttcccaggctctgtcaccttttctggaggtgccccaaagccactactgaaggggtaggcctaggcagatatgttcagaccagatgacgaccttgcttcaatgactaacgttatttggagcaagggcccataatccaagctgagcccctcatattctcattttaaattggaactaagatacatagaaaataaggcagtgaatgttagatgctgtcaggtgctatccagctccatgggacctcaccattgtggagcaccatggatggatttcccaaagctgagtgttttctctggtaaccaaagacatcattgcacatgaccatggcaagtcagaagtaccagaaattgatattcctaggaagagctcttcagcaatgacttacagaagttgggatgtaaacacctcagtttctttgcctcttgcctgggataactctgaggcatgtgttttgtaccaatttccagagtttctcggcaagatgaagttccacttgcccacagaggtaactggcttgatcatacacattgtatttattgccttctctttcctgttttacttcccaacatcctggtcagtatttcctgggattacctctcaaataaaatgcttgtactcagattcctgtctcagaatccacttttaaggaatcaaaaattatgacaaaacaataggtcaggtagatttaaggtcagttgggtcatagcaacccaaagcgtcatatgttcaagttaaagttgtgaggggaaataaaatttgttaaaaacccttgaactagcttacataacagataatggagaggtgagtagagggtagagatgagagaccataccataaaaagagagagccaaccagtaggccagagatactgcctggtaactttctagcatttgtgtttcgtgagattacaaataggttttcttcttgagatagtgtaaagtgtatctgcttcttgctatctaaatatccctggttgagacaaaagtcaatcttcttgagacagtatgaagtgtatctgcttcttgttatctaaatatccctggttgagacaaaagtcaaaaatcaactaagctggaagtttgagggtcaaaaaaagctatttgtaaggaattgctagtatacagcccattggttgggtggcagaagagtacaaaacaccagtgaagatggcttaataggggaggaccaaaggcctgacagaattggcacaggaggtgagaaaattaagctgtgagaagaaaaagcatgttttgtctattaacctgtgatattatggtgaagaagaagcctcaaagtgcttggaaaagaagcacttattgatattctccgagcgtaagtcaaaagtggacttaaagatgccaagtaaaaatccctgccaggctcagtggctcatgcctgtaatcccagcactttgggaggctgagtgaggaggatcacttgaggccagaagtttgagaccagtctgggctacatagtgagatcccatctctgcaaaaagtttaaaaattagccagatgtggtgccggtgcacctatggtcccagctacctgggaactgacgtgggaagatcacttgagcctgggaggtcgaggctgtagtaagcagtgataacaccactgcactctagcctgggcaacagagtgagaccccatctcaaaacaaatcctcatgccacatggaatctatactggctatcttttcatttcttgcctttcagtttctacatggagtgggattgtgcagcattctgagttctgttttactggttttgttttttaaacaaacactcacattctcagcctaatgagaaggaacattaagcagatagagatagaagctagggtggaacgggacaaaccactggtcctccagggtgaagctggagcaacactgagtgctaaacaaaagttactaattcaatgagtttcggaaatgattgggaaggaattactggagactctagattacagcttttgaaaaatcagctatcagtaaaaaattagtagcaaccttggggattctcatgaatctaatcaatacttgaattaaataacaaaattgaaagacatttgaggaaaaggatagataaaggaccatgttttgagaaaagcacagataaataaaagatggagaaccttcttggtaaagttctgtaatagatctttcctaaaaagtaaaaatttttttcctcgttaaaactttttcaagtgctttggcctgtgacattctccctccccctcacacccacactcattgaaatttactttttttttcaacatttgtccaaggacaatgttatgtaaatttctctttagaatacacaaatgggattttaaaactcttcaaagggaattgaatgaaaagggtctcagtaaatagcactattggtctgttatcagagggacacagagaaaaaaaagagagagacaaggactgtcattagtatctgatggcagttagcccaatgtcacaggcaaccttaccatgtcttaagaagaataaaaaactctttctttttttaaatacaattttcattttgaaataagtatatattcaccacgagttgcaagaaaatgtacagaggggtctgctgcactctttttccaatattaacattttgcataactatagtcaataatcaaaaccagaaaatagacattttttcagttatacatgaacccgtttgtgtgtgtgggtgtgtgtatgcatgaatgtgtcctgtgcaattttatcataatttgtaggtttgtgtaaccaccaccagatacggaagctacccctttatagccattttccccttcattccaaacacctggcaaccactaatttgttcatttctataattttatttcaaacgtgatgtataaatgaaatcatacagtctatataaccttttggtgattagctgtcattattcagtataattttctggggtctatctaagtcattgcttgtatcagtagtatgtatttttttaaattgctgagcagtatttcatagtatctatgcatcacatttgtataacaatccacccattgaaagatctctgcgttgtttccatttttggcagttacaaacgaagttgctatcaacattcatgcataagcttttgtataaacatactcctttatttttctataataaatatctaagagtataattgctagactgtatgtttagagaatttttagtttcattagaagctgccaaactatttttcaaagtaactgtgccatcttacattctcatgggaatgtattccccctatttggtatggtcatttttttactttagccattctgataggttttagaaaggtacctatgcttgcctattgagttcattcaagttctagtgtttcactaagaaataagtatctagaattaattggatgtgctagattgaaaagtaaatgactagaataacaataaagttaagaaaaaccatcaacatcgtatgggatatcgcttataaaaattcatagatatgtaagaatatattctgaaaaatgccacttaacagagatataatccagctttatttttagttattgatgtgatatttgaatgaatttataacaaggaatgttaggttttctctttaatttgaatgtgctttttttatttttatagaaaaattctatcaggataactgaactttctacatgtttcttcctgtagtttgaatgctatacagttttttttattttgctgtggttacttttatattttaaacatggtttatttatgtgacaaaatctagtgttgaccaacatctcaatcctcctgcaaatcaatatgaggaactataaaaatggctaatcaagtaacttccatctttcacgcttttgttttttagtttatccttgatttcaagtgaaacaaattagtaaacatacagtaattgttatatacattgctgtatattaaccactttgaatctttttaaaatttttacattactttgcatcttgaccctattactttttatctgagttcatgtttcttttttatttctagagttttcatttagtccttttaaaagtatgtgttccttattcatacaatcgctgttttttcaatatatttatttctacttttagctctttaaacatttaaaatacgtttcttttgtagacttctagagtgttttataatttctttttttttttttttgagacagagtctcgctctgtcacgcaggctggagtgcagtggcgcgatctcggctcactgcaacctccaccttctaggtaagcaattctcctgcctcagcctcccaagtagctaggattacaggcacccaccaccatgcccagctaatttttatgtgtatttttagtagagatggggtttcgccatgttggccaggctggtctcaaactcctgacctcaggtgatccacccgccttggcctcccaaagtgctgggattacaggtgtgagccactgtgcctggccaagtgttttataatttcttatttttcgggtgctgattttcctattggttacttctagtgatactcccagttactaccaatgatggtgagtttccttttacaatttgtagtttttaacagcaagctcctctttgatagggacttgggttgtggatgtgtccgtacatcagccagtgtcataatagcttcatggtttggaccaatatcctggaatagcattttcctaagttgcttgggatacaaattcacatcctatacttacacattatctagactagttctaatgtgactttgagccttgatttttactaagagatcaagatagattttttttaaaaaataccatttttctgggccagcagatagaatttttagtactcctttcacttaaaaaataattaataaatatcatttattatggaatgcttaaaagggcagatatggagctaatttatggatcctttgattaataccttgtagttttataacattgatttagtatgtggtaagctcaaggacagagacaaaaattttgttttctttgcatagaaataatcatcaccaattaaggacatattatgtggaagatattattctgggcacattaaatacattgctacttacctttatatcacatactcaagctggttattattctttcatttaacgtttaaacaaaaacccaaataggacatataccatggctatgttcacatactttgctcacttctcactgaaaagagactaagattttgtaaaatgttatatttttaaaaaatgattccctattcaaaaaacataggaaacgttgaaagcactattatttacttgatcttctgagttctgatcttctctctcatagatatgcaataatctccagcacattcaatgtaccaacccaaagtttcgaattttttttaatgtaacacctataatatcccctgaaactctaaagctagcaattagaataactcattttcggaaattctgtgggtttttttttccattctttctcaaaattctgtgatattgaaagggcaggctgatattaaattaaaaaaaaaatgtaaaactgagggtaagaaacttgtgagacaatggcagtctttgaatgaaatcccaggactccagagagctagcttggagctacctctgcttcttaatgcttagcagcaatatttattgagcgtataatacacataaataaacttatttaaaaatggccaactgaaattttcttgcatattgtgagaatttagggtagtagtggggaattacaaatcaaagtttcaagacattgcagtgagttttctttctaaatatggcccccacaatatctcccatcctacatgctattctttctttcttttttttttttgaaacagatcttgctctgttgcccaggctggagcgcagtggcacaaccttggctcgctgcaacctccgcctcccaggttcaagcaattctcttgcctcggcctcccgagtagcggggattacagacatgtaccaccatgcctggctaatttttgtatttttagtagagatggggtttcaccatgttgtataaaacaagaatattaagcctggctaattttttgtattttagcagagatggggtttcatcgtgttgcccaggctagtctcgaattcctgacctcaggtgatccacttggcttggtctcccaaagtgctgggattacaggagtgagccaccatgctcggcctacacactgttcttataatgtaacgtcaatacttttcctattgagcagtgaggtcaatgtttcctccccttgaatctgggtgcgcgtgagtgtggcagaagtgatgacctgtggcttctaaggctaagtcatgaaaggtgatatgaattctgcctgttgccatcgaggtgcttgctctcagaccccagcatccatgcagtaaggaattccaggccatgtggagaggccatatgtagatttctggccaatatctcccagctggcagctagcatcaatcgccaaacatatgagcaaggtatccttggggatgatgtcagtcctagccgccatctgactgcaactgcatgaggtaccctgagcaagaactgcctactgagaatagtcaacctccagaactgtgagataataataaaagcattggtattgttttctactactaggtttgggatagtttgttacacagcagtagataactaatacagatatcaaaatggtaactaacacagagatcaatacaaaggtttgcgtagaccgatggagaaagtactctagtaggtgcatatagcatttagtaccttgagaaatagagaagacataaatagattatagtgaaataagaggcagtttgaaacatttccctttcattctaaaaatgacacatgttcagcatagaagacatgaaaaattcagggacgtacgcaaaagaattttcttaaactttaaattaggacaatattataggtattagtttgtaatgtgtttttctcacttataatttatctagttttcaataatttctcaccatatgtttaaaaacattaaacatatggtgagaaattattgtttttaaacatattgtaagaaattattaatgtttttaaacatattgaagaaattactgaaaactagagaaattataagtgagaaaattatattacaaactagtacctattagtttaggtattcatgttgaaaacaggaagaaacaaacatgttgtgagaaattattaaaaacttataacttagttgtcatgcaatggcaatttcatgcttaatattcttgttttatagacttattctttcaacaaacattttctaagccctttccatagggaaggtgagaatggacactaagcatgtagggcttgaatttgctccttgtcatcgtggagattttagctactggaagaaattgggcattaaacagtcaaatgaaaccataaatatgcaattacaatgaacaaaaaatattgagaagtgagtgtactacatgctaggttggataaagaaagaggaaggcagagtgctagaaaacggacgtgaaggataagaacgaatagctctatgaagtgatggggctcagaatttgaggaagaggtaattggatttgtgaaggctctcaaataggtcagttaaatggatagaagtaagtgtgcagagtactaggatgagggaagaagagtcggcaggggccaattaacaaatcctctctagttggatatttagggtgtttctagttaaccacaactataaacaatgctgcagtgaacattattatatgtatgttatacatatatatatatgcatatatatgtggtttttttttcatttcgtgtgtgtttttcatttgttttatttttttgagatggagtctctgtcgcccaggctagggtgcagtgacacaatctcggatcactgcaacctctgcctcctgggtacaagcgattatcctgcctcagcctcccaagtagctgggattacaggtgcccaccaccatgcccagctaatttttgtaattttagtagagaccaggtttcactatgttggccaggctggtcttgaactcctgacatcaagtgatctgcctgcctcggcctcccaaagtgctgggattacaggcttgagccaccgtgcctgggctgctatgtatgtatcttctgcatatctcttatttttatagaataaattatctcaagtaaaatagatgggccagagtttgccctttttaaggttgtgatacacagggtcctacataactgttatccagatttagctttagccttcttccttcactagctcccttcctctttccctctcttccttctttcttgtttttcctttcttgctcttttctctttcttcctcttcctcctctccatctttatttcatctttttcattattttaatatgaaaatatttcatattttaatcagaagattaaatttaataaatgtaataggaagaaattagctttgttttgcagacatgacaatattggtatccttaaagtttccttctttaaaataccagtcccatattgaacatatatgaaatgtgtctactgatgtccttgaccctttctcttacatttctttattttcacttttatttctcctgacttatttcccattgacaatgaagcgtgggtgcctttgaaaacagacatcttggggaccttggtggttgtatgtcttcaacggcccatacatggtcttggattgtgctattttaactgatccctagaggctaatgcttttctaagccacacacacatttttggaagatcactggacaatcctgcctgtgcataaaatatataaaggcatcttagagaccccacaagaatatttactaaaaccccagacagacacatttcaaggagatgggagtgaggaacaggaggttttagaattactattgacctgtaggtatgtttgcaaaattgtctgctatctccctaagcttcccgtcaaacaaataattgccttccacaatgaaggggctaaacatattcacattgggagtgtttgcaggtgaaacaagcaatccttggaagggaaaagacaaacttagagaatgtttgctgaaatgtttgggaagcatttgccattgtaggcaaattcagtgtctgacctgtattattgattcttgtgagcaaatttgggaggggtagagggttttatatctaagtcagagaaacaaagatttgtggtctgttgggtgctgcatacatggaacagattccttcaaaattatttaattctgggtagtttttcttctttaaataaacaaaggagttctatgtcaatgtgaaaacacccatgtttgctatgatgatagagtgagattcactaatagtgttttcatttgataaaaagttgatgtaattcttaggacaggagtgaaaaagcttaagaaatatgatgacctgttctttacttaaaatttagcccagtgataaatcgtgtgggtctgtactgtcccaggcctaataaaggattagaaattggggacctgtcctcaagacactttactgccatctgccggaaaatcttcatactaaaactacaaatcactggtgatcatgccacggaaggcgccctctatggttgtgcaaggtataacttgcacgatcacacagtgaccctctaggggatattaccaggcataattaaaacatctggtagaggttgacacttaagacatagtcagtgaccttaaggctttctattagaatgaattttgaactgagaggtttggatttccccactgatccaggctgtaggtaacattattccattttgtgaggtgctgatgatttgagatgaattgcacacagtttttccatattcaaatattgacttatacgaaagttgctgtgggaaggagaaaaggatcatggagggttggggtgggggtcgtctttgtcaacacccctgcagaaatcttggtttgtgctggccaacatctgtgctaatatataaactggagttgttggcagcaggatgggaaatctccaggaagacagcctctgctaacctttttattttcctttattaaatgctaggctggaggtaaccacatagatctgaaaatgccgcctggtttaattagccaagactttcaggaagacaagtaacaaatgacaacttaattaaacacaattaaaacattttagaacttcttgaggcctctttcaatagggcagtgattgcagcatgagaggaggccatggaaagaaaggcaaggtgctttcattttccttttccttacttttttggtcacagctccttttttctcttcactattagaaatgcagctggatcctatttataatccattttcacatttgtttgaattaaaatcccagattgttgtgctttcaaggttgaatgtgcatggcagccaacatttatccagccatttcaggagttactgggtaactgggctccaggaagggaaaccacaccatgcgtttgagccacagggaggagagagagaaaacagactcacacctaaaacctctgacatcactgttgtttggagagagattgttctgctctgaacatgtgctccctacttaagactctaattactctaaattacttaaatgggccctaatacctacgttttattatttgatattaaagaacaagccattttatgaagaaattcatgaagcaatcaaaatattggcaacccattctcccagtagaaagcctggacttggaaatacctatgctttctaccctaccacctgaattctaatctgagagctgccgtgtgctctcccccagccttttccagtatcctgtttatgtctaaatccaatagtccagccatgccagcttgttaccacatggaaaactccactgctcagagaaagttatgaatccctatattctttatgctttaagattcactatgacatctcaaagtaattggccaggtaaacctaccagatggtttttgggggatgaggaatagactaataatttccattagcataatattgttattataaagatttaatgacttcactgatgtggtgtcctgtcctggtggaaagtttatgagccagaaataaaataatacttatgggtacccatgaggctatttgaaagaagtagtagagaggttaatgagatctcaggtccctaaggctcctaacagaatgttcctatttgagctgagctaagtgatatgagaagcacaaggcaggctgcacagggggcaagggaagctcaatgccagtcgtgcgtctgctgcaacattgcaaattggaatgagggctctgatctggctttggactgcctggatttcattcctggccccattgtgcactgatgtgaacaccttgggcttgttacttaagcaatttgtgctgcaggttttcatctacaaaatggatctaatagcagtatgtaatcagtggttgtcttgaggaatgaggcgatcctcacaaaagtcttagggcagtaccaaggacatagtaaacatgtactgcatattcaccgttattatttttactagttgcaaatcatcagcctgtgctgaaccttaatttcctaatcagtcaagtcaaagaggttggcctaattctgaaattctgtgattctataagccagaatcctgatataattaaaaactattctgttttgaaatttgaatgtgggctctgttctttgcgacccatcaccagactttggaaacaaagtgtattgtacaacaagtgttaactattagaatcagagttctggggaagggccgttgagtgaggaagaggctcctaccttgcagacagaaggaatggtgatagtcataacttgtacttgtggtaacttgtttgggaggtcattagtctcctttgtctaggggtcatggagaggagaaaacgtggttattttctataggggcttagaaatggattattgagactggtcatccttagttatcagatgcaagaacatatccttctcctctgacaaggaagtatcttcctccattttcctctctttttacagaaaaggagaggatacttttggaaatacagggcaatgaatcaggtggttgctgcttctagctgggataagtcttgtatttccagccctaccagttgcctgtgtctagtagcaaaaataatacatgccccttggttttacaagaattattttggtttctagttgtctgaccgtaatcaggcaatgtagttgaacatgctctgggaatatgatcgaataatccattaggccattgacttctctgtcttgtatacacagagcaattgctcttttctcctgtaaggaagacaatgtgtccttctttttcttcccatgtggcttcaatacaaaagttatctgtccctttagttatagttaccttggtgaaaaacatgaatgttcttgagctttgcattagatcagccatattgaggaaaactttgaccttcaaatctttacactgttgaaacagatgaagccaagctccctttgcaaaaccattttttgttttgaggtaaaaacacagttgattttggctgggtgtggtggctcatgcctgtaatcccagcactttgggaggccaagatgggtggatcacaaggtcaggaaatcgagaccatcctggctaacacagtgaaaccccatctctactaaaaatacaaaaaattaaccgggcatggtggcaggcgcctgtagtcccagcgactgactcgggaagttgaggcaggagaatggcgtgaacctcctctgccaaaaatgcccttctcctcttgccatatgtcttgagtgtgtagggacatggtgtgcccatagataacccaggaagaacttccctccaaaatccaaattcctaggaaagcaacacattaataaatgaaggcaaaggtcattaaagtttcttttaagcacattgcctggtttccttgaggggcaatgttgatttatttttcttattttatttataagaaagcaaataatttatgtggataacttacatatctttaaaccacccgactttgtataaatagcgtttctgtctttagctgcaggtgcaggactcgggaatctcctcttttgagtacccattgattggcatttcagtatttgcagttagtccatgtggttccattgaggttaaacactcagccccatgaaattcaagcagttcatttcctattcaaacaagttaaatgcaagagagaaaatgaagataaattcctcaatggaccaagataagctggctgggtgaggagaaagataattaatcaatcttaagccagctctgattcttctaggttttatctttgcagcttttggtggtgaccttctatctctgaatctgactgatttctatcttgcttttacacctaaggcatttcagtaacaaggtcgaagggggttggaagttgctcccaaatagtccttctattgagtggattcccctgggtatgaggggaggcagggaaagatatgtagcagggatgaccttagagagaagcaggatggggttctctttgtatgaaacaccaacaatacaaataatttcttacggaaaacttattaggaaccaaacttgaggtcaactggctccttgctaatcaaagcgtgtttgtaaaccggtggcattgatatcatctcctggaagcttgttagacaagcagagtctcaggccctgccctccacctcctgaatgagaatctgtattttccaagatccccacatgatctataatgcacctggaagtttgattcttcttgagtcatcgttggctgatggccacagtatttaatatttgctggtcctcagacccttgatacaaaattttggcatttgaggaaagagtagactatattaaatagctgattatagcaaaaaaactattagtggtagaattgggaaaggtaatttttattcccccatctgtctctaatcagctagacggccttgagaaagtcatttcacctgtctaggtctcagggtattggtactgataacttctaatgattctgactacgatatttaatggttgtgtgaatataggactcttgatatatggaacgagaaaagttcacttaagaattcgttgcaccaaacacttagatcaatactgcatatatagggtgagaattctttctgtccatacatttcaatttcatagctccctcctctttcatgttgcacaaccaaatcatcaagcccatggtggggctgcttggttgatttgtaaaaaccgttaaaatggttgcagaaatgaaaactgcagccaaatagcgtgtagtccctcaaaatgtgactcaagaacaaaaaagtaaaaatggttttgtttccaaaagggctgttgaaacatacaggtgaacatgttaaaaacatggctggaccatcaaatacttatggctagatgctccagtgcttccagaacctgagacttgagtttcagctggatctttcatatactttatataatgtaaactataataaggcataaggttccatgttttcagctatggaaatataggcaagaatatatttatatatgtatatatatacacacatatgtatgtatacatacacaataatgatatatataatctacatatacatatcatacatttttctcaaatttcaaaacacgattacatcttattcaaatgattctcaggagaattattttttgcttgttaaagttcatgttatctataacccaattaaaagtttatcgatgaaaactttcccaaacctattgagatttggtcatttgcctctaagatagcatttatgttagtttgattagcatcataatgagtcatttatcaactatcttactcattgggttgtaaattcttcaaatgcaggaaaattgattattaatatttgccctatgagtggctacagtagttcctgacacattgcaagtatatggcaagtatttattaaattaaattgagttagtattacagaatatcttgactcctattgttgttttaattaatttttaaacatttccaaattttttatttatgaaactaaggccaaactacattttagaataatgacaataggataggatctagaagattcagaaggagtgcaaatctctgaaaacaatctactgcatgtactggagaaaatttcaggaaatttttattcgttgtacaatttaagaagacacaatttccacaaagctgggacatagcttgataatgaaaagacaatggttgcaaggaaaagaaggtacaataagataaaattacaaggaaaatcaaacaactaaccaagcttcaacattagaaataaatatttgctcctgtagggcaagtggtgctaagaaatatctctaaactagagaacaaatttgggaaacactctcagaagtcagaggaaaagccaacaaattaaagatgatgagaaagtaagtgatcaataaggagactagtgaatagagggatgacttcagaaaaactctcactttccaaatgagccattgggaaaaatagatcaatagcaatttatcaaaaagatgttaactgaggactgaggtttgcagaattatagaaagcatcattttccttctcgtgagcaactatcatgttatagtcaaaactggcacatagggcttatacgtagcctcatctgggcaaatgtttcaaagtgaaaggactttaattctgcaagtatccagacatggaagaagtgtaaaaggctagcagacaaaatcataaaactcagggtggcctctggcatcttattgatacaaacattttctaaagataattgcatgcgggcaatggatagcttataaatgaagaaaatcaagttatgaaaatggatttatcattacttcaaaataatgaaagaacttaaaataagtaaaatgtaatcacgaaactattacgtattatggaagagagaaaaacaatgttgagatttgcgaagtctgtgatagcattaacaacgtttatgtaaaagttaaaaacataaaataaaatatatgctttaacactcatatacatgaggtaaaaattttaaaaacatatatcaaatgcagattaatttgtaaaaatgcttgcacatggagaagaacgagagttagggcaaagaatatagaagacggtgtttgactgctctgttttattttaaacacacctaaagcacatttgaacgaattttgttcatttttggatggcagataaacagtgtttgtaatgctagcctttgcaattttctatacttgttcttagttttaaaaagaaaagcaattatgacaaaattgagacatcagttaccacatctcaaattaacagtataggtgtgtgtaaacatgtatatatatgtgtgtggcttgtatatgtctgtgtgtatatttgtgaatgtatgtataaatagatgcatatctatatacacatacatgtatacacacatatatacatatatacacacatatacatagtcgaacacacacacacacatatatggatgacatattgataagggttaggttaagaaagctttgctgtccttcactttaagtgaggtctatactgtcagacataatatcaaaaatcttaattcccatttggaaatttgccttttgatctagtgataaactccactaggactttatcctaaggaaataataaacatttagcagaaacaaaatgtaccactgtatttatttaataattcttgtatccatttatgaaatatttatcaagcacctactatgttcacggaattgtctcaaatattcaaaatctcagcctgctgaaagttcatggcatatttctagcaatgaaaaatttgaattaaagatcacagaaatacctaacaaggattgattagtttattataattgtgtttatatattagaaaacaatttttccatttaaaataattttataaattttaaaatatatttataactttttaagtaacatataacttacataaaataatttacatgctatgaccatacttgtaaattaatatgcttacaaaactgctttaaaagatgttatttattttgggatgttgtgggatgttgtaaaatatttaggctttgcttctatctatgttttctattttatcactaataaacatatatatcatgacaataaatataatgttttcaaaattaaaaacaaatgtagaatataatttttataggataatatctgtaatacataaaatctacatttaacttttaaataataaattaaaacctttggaatcaatttccagaaaaatactgaaattaatattgccatacccattacatatttactttattttaacatttttgaatggtacacatcctttgacccagcaagtacatctctaaggatttaattaatagatacacttacacatgcacacaatgttcatttcagcattgtttgaaatagcacaactaaaaacaatggaaataactatcaattaaaggatgaagtacaatccacataataggatgttttacagcaatacagataatgaggcagctccccataaactgatatgaaaatggaaaaaaagatacagaataataagttcattataatatattttactaattaatttgtacatatataaatataaagcattaataagaatctgacgtttttatttttttttggcgggggagaacagagcctcgctctgttagccaggctaaagtacagtggctcaatctcggctcactgcaacctctacttcccgggttcatgcagtgctcctgcctcagcctcctgagtaggtggaactacaggggtgcaccaccaagcctggctaatttttgtatttttaatagagacagggtttcaccatgtttgccaggcgtgtttcgaactctcggcctcaagcgatccacccttctctgcctcccaacgtgctgggattacaggcgtgagccaccgtgcttggccatatgattatttttggtgagggtaagattttatacttttcattttatatcatgtaatactgttaagtttcgtttttgttttcaggttttatgattgaaaactttacatatatatttcaaaaataatctgaaataaaatgttctattagtctttctctttgtatgtattgatgacagtatacacatatatttcatcttaaattataaatagtcataaaactccattcaaatctattttgtaataaccactttcactaagtataataccattttgagacagcaatgggacaacagtcatcttaaagatattttactctctttctttctgaaaacacaatgatagaaagtatttgcacatttgaactatagtctatgggcatctttatttcctttgcatatctttgagatgactgtatttactttctgaagaactcatttattcaacaatttgatacaaaattatcagaacttaattttgtgtacatcactgtttagcaagttcttgtacacagcagagtgtgcgatctagaaatctttgggccatatgtagcttactgatggctcaactttttggctcagaacactgctgaaaagaaaagtaaaggaaaatgtaattcttgccaggtgccgtggctcacgcctttaatcccagcactttgggaggccaagacgggtggatcactggaggtcaagagttcgagaccagcctggccagctgaaaccctgtctccactaaaaatacaaaaaattagcgaggcgtggcgatgggtgcctataatcccagctactcgggaggctgaggcaggagaatcacttgagcctgggaggcggaggttgcagtgagccaagatcatgcctttgcactccagcctgggcaacaagagcgaaactcaagaaagaaaaaaagaaaagaaaagaagaaaaggaaagagagaaaagagagaaaagaaaaggaaagaaagaaaatgtaactctttgctaacgaactagcattttaaaattggaagatttctcatagaactcgcatgttttgtctcacccacctcgaaaaaatcagatcttaaatttgacctgcattcccactgagaaactctcgctagaactaaagagcaactgtttcctttagttcgggcaggccgaaaactcccctatctttcgtagtccccaccagtccggaattagttacaccctgtttgtgtggccttatttgttctacatgcatcccaagtttattgcccacgaattaaaagaagaatatgggcagaagggaaaaatagctccatgaggaattaaaacatactagaaagctcgaaacaattatgatagtgtggtattgaaccacagatagacaaattgaccaatggactaaaagagaaagcacgaaatagaaacaagtacatatggaaatttagcatgtgataaaagtactgtcttaaaccactgagaagaaaagcagcaacttttacatatatgatgcagggacaatgcattagccatttgtaaaaagaaaaattatattcaaacctcacgctgtaagaataaacttcaaatggcttacatatctaaacacaaaataatgaaaccacacatggactagaagaaaacatgaatggatttctccaacctctagggtagtctagggaaagactttctaatcatggctcaaaatctagaggtaaggaaagagaagattgataaatttcagtgcataaaacatgcattaaaaattatagccgggcactgtggctcacgcctgtaatcctagcactttgtgggaggccgaggaaggtggatcacttgaggccgggagttcaaaaccagcctggccaacatggtgaaaccccttctctagtaaaaatacaaaaaaattagctgggcatggtggcgggtgcctgtaatcccagctacttgggaggctgaggtaggagaattgtttgaacctgggaggcggaggctgcagtgagccaagatcgccccactgtactccagcctgggtgacagagcgaaactccatgtcaaaaaaaaaaaaaaattataaacaagtcagaagatgagtaaaagctggaggaaaatactcatgagttcatgatacataccacagacatagttaatatcaccaatatcagagaaatattataaattatggagcagagttctaaaaacctgatagaaaaatggcaatagatacaaacaggtaattcacaataaagaaaataaaaatagcctttaaaatattaaaaaagctcacatctattcataattagaaaatcacaaattaaaattatgctttttcccatctattggattgacgaaaatttcaaaataggacaacacattccgttggcaaggctctggggaaatagccaccccttacattgctggtagcaatgcaaattagagggaccttctggaaggaaacttggcaatatctaagaaaactgcatgaacccttatctcttcacccagcaatcctacctctaggagtctatcctgaagatacatttccaataatacaaaaataattgcagggaagattgttcactgctgcattgtttgtgatttaaaaatattagaaatggctgggtgtggtggctcacacctgtaatcccagcactttgggaggccaatgtgggcagatcacctgaggtcaggagttcaagaccagcctgcccaacatggagaaacaccgtctctaataaaaatacaaaaaaaaaaaaaaaaaaatgagccgggtgtggtggtggacacctgtaatcccaggtactcaggaggctgaggcaggagaatcgcttgattctgagaggcggaggttgcagtgatccaaggccgtgccactgcactccagcctgagcgacaagagtgaaacttcgtctcaaaaaaaaaaaaaaattacaaacaacctaaatgctcatgtacagtagttgaagaaatggtggtgcagccccacagtgaagtcctgctgtgcagctgtgttgctgaatgaggatggtttctaaaaatggatatgtggtgacatccaggaaacactgttaagtgaaaaagacaaagcattaaggatgcctgtagtgtgctacacttcatgtaagaaacaagaggatattgtaaaatatgcatgtgtctgctgatttgtgtcaaaaagtgatacaggaaggataaaccagaaaataaaaaggctggttggttatgtatggggtgtgtgtgtgtgtgtgtgtctgtgtgtgtctgtgtgtgtctgtgtgttctggaatacaaacaataacaaatgaatgcataatcacagagaagaaagggagaagaaatgagctgagtagctttaaaatgacaatatttagtctgcaaagttaaggtaaaagacaaaaagcactatctacgaatattcttctctacttaataaatttgtttctgacatatgtataggttagcagctctggaactactttatatgtatactaggattgaacaaatgagtaaatatattgtggatactgagagctgggtttctccctatcagagaaacaaaatacacacaaggaaagagggaaggctgtggtgctggattgaagttataggatcagtatgaatttatgtttgtttatatatactcacacacatacacatatgcacacaaacaggtggatagataaataaatatacatgtttgtgtatgtgcgggtacatatacagatgactttttacctttaactgctgcaagggcctagaggcaatggcacttgggcagcaatcagcatgccttccatcaagatcttagtttctaaatattattctccaataaaaaagatagactccttggttaatttcagggatagggtagagaaaataccagatgaatgtggaacttctcttggtgacagaaagttagaaagtgctttttattaaagaaagaaaaaaaaaaaggccgcttgtaaaaggacacagaatctacccagtaggagttctcagcaaaaactggcactagtatgagcccaaaacatgatatattaagttataacacacagaacaaaacaagtatccatggaagtaacacaaataaatagccaaataataaaaaaggagaaaggacagctcttttttactgtagaatttctatcactaggctgggtgtggtggctcacacctgtaatcccagcactttgggaggccgagacagtcagatcatgtgaggtcaagagttccagaccagcctgaccaacatggcgaaacttcgtctctactaaaaatacaaaaattagctgggtgtggtggctcacttctgtaatcccagctactcgggaggctgaggcaggagaatcccttgaaccaagaggcggaggttgcagtgagccgagatcatgccactggactccagcctgggcgacaagagtgaaactctgtcttaaaaaaaaagaatttaaaccaccaaataccaaatatagagggaatgaaaaaaattaaaaagtcatcatcaagcaatcacaaataataattatctcaggcaagaaccattgatggatgctaagatgtatggaggaaaaaggactagaaacaagatagttgcatagtctcaaagtatctgcccacaagatacttattaattataaaggaaaaaggagtaattttagagcagagaaatccagtagacaccatagtaaaacaaaatgatccaggtttacatcaccagtcataagatgtgttgacatcacctacctctagtatgaagcacagagaagggcaccatatcacatttgtgctattcttgacaaaagtgcataacagcagtctaatcacagggaaaacaaaataaaaccaaacctaaagataaactataaaataattacttaaaaacaccaaaaatcataaaaaataaggaaagatggagcaactggcacaaacctgaaaatatgaaggagacatgaagaaccttagcggaaaactggggaaatttgaataaattcttctaattagttaatatttttaaccatatcaatttccttattttgatgattaaattctaaagttataaattgttcaagatttaggaaatctgtatgaatggtatgtaagaactatctgtactatttttgtaacttttaaattattgaaattaaatatttgaaataataaaattatttcaaaataaaaagtaggaaatcatacttaaatcaatcagactcttggaagttggtcttagaataagctgaaaaatgttgggaaaggaattactgaagagaaatgataataataggaagtcagaaaaaattgtatagttagcattttttaaaaatgtaaaaattgaaatgatgtttcaaatcttaggggacaataattgatatacttaaatgaaaacaggtggacaaagagaaagacaaaatactaaaatacccagcactcaatttgaaaagatataaaaagtatgtgtaagtgtgactgatttgaaagatcaagttcagctgggctaaataaattcgtttctatattttccaaaatgcaatcttatctctcttattgaagtaaacctaaagctaaataaaaataaagacgagtgtgtgtttgataaaattccagaaaggttgctggagcccagaaaccatgtgatattctaaagatgtcagaatttggccctcaaggatggcagttggttatgaatgtcaacctttaactctggggctatcactagatccccaagtaagattttgctgtttaaaattttttcattcttctgttgcctcccaattgtatgggcaaagcaggttttatcacactttgtaagttcatcacatgtaattttatttctgccacgctagattaaatttaagggtcactgaagtcaggagccactgacctttgccctgttaatggttctcaccattaatacttgaccctaaaagctatgtatacaataaaccatatttatagggtggagggaagggaagagcagaaacaaagtgaatggagtgattatttgttttgccatgctgtgcagagattaggaatgttcacacagtctatacggatggcctgggactggctgccttttatggtgtctgaacaaaacatgaggatggaatcacatgtgagggtaatactcacaatgagatcctagcgtatctcaattgctccggtattgctgacacttcaccttcatcacgctttaaccagagctcttgtactctggttttctttggctgtaaaagaagaaaaataaaggacacatattatatttaagattatccttggcagaagggaaaaaaatcgtcaaacaatttatgttcagcaattagaattgtgaaagctctgagaaactgattttgggattttgtgaaatctctttcattactccacctgattgaaagagaaccaacagaaaagtctttatgaattattatctccagcattctgttcctgtaaactttacaggcttttgtacactcagttacttctggggttagttttctcttccttaacatttgggcaaaatgagtgaatttgtttgctgcttttgctttctttcttttactttttaacgtgtccagtatccagaatgtttaattatttgcacaatcaattaaaagccatttgttttttattggtaagcaacagcatctaggctggagaaagggattcacttcctgggaacagggctttcaggtcattctgtctgcccatcaattcttggattaacaggaaacattgctttcaatgacccatgtgtatgtgtgcatgtgtgtgtacgtgcacatgtgaaatagtgcaatattaagagttgctaaaatacacatgcaaatattgcaaaagagccccaagtttattattgattttctcacaggaagaaccattataactttttagggagtaactaggcaaaatcttttctgaagcttaggatataattattttggcaatatatagccatcccaaaaaaatgcctagtgattaaggcaaagaaattctcttggtcacagattgagggagagtcttgggcttataaaatattctatttcctccattaattgtgtccatgtggagttgtaaccaagtagctgaaacaaataaaacttgagtaatattgtttccttttaaaatattttacttaatgtgtggaagaggtttgaactcattaaacatgcactgttccttttgctcaaacccccaaccccaccccccctcaaagaatacccctactccaagtcagtcctcctgaaacgttccagcaatgcctatagcaccactgtctccccttccctgggaggcaggctcctttagccactctctaatttgaggtgtacgtggaaaggaaagcagagaatgtagttagcctggggccctgcaaacctcttctctttgacttggcctggaactgaagctaaatagtccattttgttttactgtagtttccatgataattctaatttgttatacttctgaaaactttggtgagaattcctggtattttaagaaggattcttcttgtgaaagaatgaggtggttttatgagagagggtacattttccctacgcactgaagctgggagtcagtggatttggacaggaatagccaggtggcaaaaagaaaggagaaactggaaagagagaatgtgtgtgtgagtggagagttgaacttctttttcttgtgctggcttatcacatctgtccattcctcaggctgcaaaactcaccagagttaacagagaagccttctcttaggcaagttccctcaagttacgtaagatagagcaaagctttttatttacttccccctgttctttcccttattgtgaaagaagctacaggaatggatagttcttattctccttaatgtagacacaaaaagccatggggagatagaacaggatttagaccatttttagtaaattattttctcccatgattgtctacatatacagtcaagaatatctggggtatttgggcaatgatatttagagaaagcaagctaagaaatctgcatatgacagaattacctttggatcttataaattctaaatggggattgttttaaaacatattccttaaatatcaacagacgtattttgagatcctcgaaatatcaacatagtgatgggttcattcatcttttccttcagtgcgtggtgggtgggtgagatcattcccctgctagtcttctcttttagggatcaacacatcaagggcttcctccaaacaccttctgcagagagtcagggctttgaatttaatgagtcagacttttcctgttaggctgagtcaaactttattttcgtctgtcaccactgggaagtgtagagctatgatacagtccttcaggtttacctcttcgagtttaaggatgcatgaaaaatgagaaaggctattaactttcaatatgattcatttctggatgcttttcaatctctctctctctctctcttttcctctcttttcatgtactgtgggggaagaatgcagctataaatgtgttatagacagtacatagtgaatgaacctattcttagggtataattttccctcttcgtggtaacactataatttaaatgtacagagaacaagcaagtagactatgtgaggtagatcaagatttctttattcagtgaagagctgaacttcccaattagaagtatcctggccaatgatatggccagaatgtaataaaaagattttacgaattggaagatattatttttactatttcaaaaggaatctttaatagaactactgattattttattaatttttattgtagtgaaatatatataacataaaatgtatcacttttaccacttttaagcgtacacttcagtagcattaaaacacattcacagtgttgttcagctgtcactactattcttttccagaactttttattatttccaaacagagacttgctatgtattaagcaataagtcctattcttcccttccttcagccctttgcaatcacagcgctaatttctgtctctgtgaatttgactattttaggttcctcatataagtcaattcacaaaatatttctccttttatgtatggcttatttcacttagcataatgttttcaaggttcattcattctctagcattctgcaccatgtgtcagaatttcattcctgttcatggctgaataatattccattgtatgaatatacccctggattttttcaaaaacatattcatctgttgacggacagttgagttgttatcatttttgactattatgaataatgctgctatgagcattgacatgcaagcatccatttgaatctttactctcaattgttttgcatacatatccacaagtagaattagtctattatatggtaagtttgtgtttaaatttttgaggaactaccaaactgtgttttacagtggtagcattattttacatttctatcaacagtgcacaaatgttccaatttctttacattcttgtccacacttgtctggttctgcttttataatgcccaccctcatggatatgaagggcatctcattgtgggttttggtttgcatgttcataaaagttagtgaggttaagcatcttttcatgtgcttatcaactatttgtacattttccttggataaatgtgtattcatttcttttgccaatttttgaattgggctttgttgttgttattcaattttatgcgttctttataaaatatattctgacctttctacttcttttcagtcagatgtttgcatgctacatcaaaatgaattctcttacatgaattattttactatattattatgtcattttatatatgtgtgtatgtataagagtagataatttcatgtatatagtgtgtgtcttatgtatatgcatgtgtgtgttcataaattttaggaaattaagttaaaattttttttgttttatttagccatcctcaatcagagacactaaaataatagtatataaacaacaaaaagtaagtagttcctcttgagttatttaattcttggtcatttctaatatgtttcaaagtgaaataagcagtaatttgtattaactttaatgtaaatctgacttaatagttaagatcttggtttctgggggtagcctgcctgggttggaataacattctgtcacttactgtcttgtttagtctctctaagcctcaccttcctcatatgaaagttgagataatagtagttacataggactattgtgggaattaaatgaagaaacctagtgaagtgatctctgcgggtcttacctcagaacccacttggtgctagagaatcctttaataacagaggaagttcataacccctagagatgctttcctagacctgcaggtagaagccgtggcatggattttaccactgtattgcagggtaatcatcagaattcctccgaggtaaagaaatgaacaagaaattcttatggcttgagagcccaagtacattttaaaatgaggaaatgccaactcagggttattaaaatgtggtatattttaaatgcctgtgtctaacaaataaacagttaacgcacatatacatgggtacacacaaacacattgactgtatatgacttaacttggtgataagatcaaaagtctaaactttatgttttaatcaatgagaggcctaggccaatctcctgctgcctaccaccactatcccatgataaccgctggcagtccacaaaaataagacaccatggcagattagggctcaaataaacatgtgtatcatttactctagtggatttcatattctgatgcccaaattttaaaaacatatgaaagtggagcttccatggttgaggtaggatgggttgttgaggctgcctggcccaccaacctatttctattagagacgttggggacaaaaacataacccatggcttcataaaacaagtttggaaatgattgctttagtctaattttatagatgtcctcctgtatcctataatctaaggcatgagtattagggaggagtcgtgcacaaaggtgaaaattgctaattagtgaaaatatacaacatgtggccctggagaaataaactgatattagtattttaattttaaagaagttgaaattaaccctgggcacagggagctgtcagttctactactttatgtaaaccaattgccaagcatgtctaaagtcaaacatgtctaaaagaatcaactcatatacacacaaacataaaaaggtctatatcacacaattattttaaatagctgtaagtggtttgctcttttccatttttttctcctccttctccccctaccacccctattttttgtcgttttctcttcctttttttaaaaatataattttctaaaccatacaggtcaggtcagattttattacctctagccaaaagtggttttaagaataaagagcaaagagcaagtatccttatctttatgctgtttgacagactatgtaaataaacagcatgccataagaaattctacagatggagttatcatagcagtgaaaaactgcacagattatgctctccttatggtatttactcatttttgtgtgacgaatgtatgcaagaagtcatcattagagaacataatggtcgctgatgatgtatttatgacatggaaagatgtcatgtgatgaagtgtttacaacctataatgaggttgtgtaacaatctctttacagcccacaattacattgactaattccttataaaaatactcaacagtatgctctccatgtgcacgtgcttgatatcacagcactttagtaactgacacctataactgcaaaatcaagcagcttggatgactcaatagtctgtttcctatccaaggcacataaaagatcctaggtgtttagttagtatactccaataaattcctcttattggaggtgactcgagtaagtaacactggcatatgtgtcaatatccttaagggttggagaatttgagaggcaaatttacccctgaaataatcattagtgtaatttctttttgttgtaatgatgggagaagtatacatatctgcactctgacatccaggaaaatatttgtacctgatcttccacattggtcccttatctggaccttatcccttatttcactaattagtgagcaatatgactcaaatgaggtccctaaatttaaaaatgtaggacagaaataccttccatatgaagttgtgaataatctgtattgtatataactacaaagatgagttagacagctggggagctggagttgttaagtggctaaaaggttgaggttcaggacctgaaatagtccctgaacctcttaccaggaagtgagcttcaagatgtaggtgagaaaattctggagcaatccggtagatgtgtaaaaatttgaaggaaaatgagaaaataggatgatgagcagacacagaaagagggggtaggatgtagaaataccatctactaaactttcatcagaatatgaataagcagttgaaagtggttctaatccaagggaagtaaatgggttctcagactaataaaaattagtccacatactttgaagagaaagacaaagtagggttaaaatatttagtttggaaatatacaaagaagtgtaatgtaggtaaactggtttaagagtaggtaaactacacaaaactaattgaaatgttattatgttgaaagggtttaattcttttcaacagatgatgatagacaccacaagattttaataacacacagaatgtggctaatcccatataataagactaaataatataacactgacaggaagtgaatatgacctggtgatatgattatgtcttgcatttacttacatctttatgatttccaaaacacttctcataacttaatcaaacttcagaatagtccaggacatgagctagaagagacatgtttgtttgtttattttattttttaaaggtagaaagtaagagccttagaagtaaaacaatcactttaaggtcttggaaggaattaatgggggaggtcatagactctctttcctcatccaaagaggatgaaaaaaataaccatttcctgaggcattgtggaggtaccgagtggcccatggccaatctaacataccaactggagacacttaactcaaagcagctccacacatgcagagagggcaccacagggaatgtgatggtttttgtttttctcgacttgctccaagacaaaaaacagctaatgtggaagcaaaacaatagagctacaaaagaagacccgccatgaaaatggtgttaacctgagtttcaatgtctagtagaaagggccagcagggcatgtcctttatatggctcatgggacagaaacatctcattaacaccatcacatggtatttagtcttcaccacaaaataatgtatttcaacaatatcagaaatgtcactggttttttagagattgattattctactcctccatgtccccctggttttttctgaccccagacctccaagaaactttgaaaaggactctgcataaataggagcaactggatttgaacagataatttggatttgaagactaacagggttcttgacagtaatacattagggcaatttagctgaaacgctctgcttattattttgtctgattctaccatgaaagttttataaagtcattttactttgattcattccaagaagtcctaggaatccaacagtattcacagaaaaggagaccagtggtgtcttcacggctcagttgttgtgatgcattttcgtctggacttatgtgctactcatttctgagttacgcgtttcataataagcaagtgggcaagttttaatggcatcttatggtaaggtggaacaatgtcttaggtagggaaaaaaagggatggtgctgctccacatttagattgctattcctggtattctagataataagaataggaacactccttggtctgctgagagggagcagagattttttgattaggctctttttctgtgtggacaagcaatgagaagcatgggatttgctgcagtgaccagttatccaaaaaggaggacaaatgtagtgggagaagatgacataagaagagaaatatagaccaggcatggtggcttacgcctgtaatcccagcactttgggaggccgaggtgggtagatcacctgaggtcaggtgtttgagaccagcctggccaacacagcaaaacctcatctctaccaaaaatacaaaaatgagccaggcatgttggcacacacctgtaatctcagctactcaggaagctgaggcaggagaatcacttgaacctaggaggcagaggtcgcggcttcactaaaaaaaaaaaaaagaagagaaatataaaatttaaatagcactaatggtatatgtggttagcaaggcgactgaggaggaagagtcactgataggtacaaaggctggagcagtttcttctgattttaaatattattataaatttgtggtttatttttcatttgaatctccaatgaaattaacggaatttcttttgaaatttatgtaggagtataaaaaattttaaaaatctatttgacattgacttttgattgttgcctcatcttaaacttcagagagaaatattcaatttcctcctcaaagccaacatcctattctgacaaaggcagaatatttcactagcactttaccttatccaggaagcattctgaaattctgagttatgaaaacgacggtcttttcacatttatgtttgtagcaccctgaaaaggaatacatgttgcaaaacttttaacctgtaggaatcttgagactctcacatatgatcccccaattaagaatatcaaaattgaaagtagaggagagagggaacaaaagatgacttgaattaatagaaattactgttaaaatgtaaagtatttagtattggatcttaatttgtccaaaatatttattaagaaccttttcacatatcaggtgatagatgccaaggagaagcaaccgaaaccagtatttgagaacctcagcctaaattgccaattttggttttcttttaattagaatgatatagatcaagttctattcatttgcctctaaggtatctccaaaaccaaactaagtattgagttattttgtaatttccttgaagaatccaacccatttcagtatttttacgataagcacaagaagactctgttttgtcttgactttggagagtgaagcttgcttccatgtgcataatttctgttctgctgtcgtaaatgatcctccattgtcagagtccatctttagagctcacaacagtttatagtttcagcaaataatagtttcataccactttatcacatgcaaaatgcttttcaaattattttatactcattcattattcccttgttatggatgagttaaattgaagtttagaaatgctaagtaacttccttaaggattcacaatgaataggcggtagacctaggaatggagtctatctatgcttggactttctactgcacctcgcagcgtgcaagtaatacaaacgcccttcataccttgcatcctgctccagtttgttgtcactgatttctcattatttaccttattgaaaaatgcctcattgagaaacaggcaaaaggaatattgtgggtagaaagtttgagggattagagaagtaatgacaaatgtatcttaaccaagtcttgaatagatgacctgtactacatagttattttccttggaaaatatttcaaaatttaaaaacttatttttgacatttcacatctaaatatctagagtagtttgaagggttttctttatttcttttatttgtcacaaagtcaataaaattaaattccgttgtggttttaattttattccagaaaggaaaaaaacaaaatgatttgtgtttcaaagataaataagaacttagatcatgctgtggattgaaactccaaccctgttgaaagaaaggggtctcctgaactttagtggaccttgtttgtcagccttactcccaaccttggggcatggcctcttgacataacctactgaaggtaagaggctgagggaaggagacaggccagaaggcagagaaaccatatgccagccagtctcaagaagagaagtgaaatgaagctttctaagtccaagggcctgctttttacagctcatcaggcttagggcaattgccaaaaagggaaaaaaaagatccccattaggcacaacctaagtatttttaattttaaaaagtcagtaaaagaaaaagagtccagaatccagtttttgtggcagcaagtacgtcatttgaatttgtttttagtttaaaattgttatgccttatgttttaagtttaatgttcatttgagtgagtactttaagtgttgctatcatattcagtgtccataagtttgtgaaaatgcttaaaaagccatcaaagtttttgtgagacaactgagagaaacttagtttggaatgtttccctgatttatttattacttttcagaaagtacattacaatcaagcaggtattaccctaatcgaaagaaatatataccactggagcttgaaagggtaattttttttggttttcccaagttttattgcaataattcaatttatgataatcaataaaatgtgtgagccaagtttattgaggtgtcaacttcccattgcataatttcccctgagaatcttaatttttaattcaaaaagaaagtggaagatttgtcgtacagatgccaatgaatgtgtggggttaaggaaagcacaagaccctttacagaaatcaaagtggggtttaaaacaattcccttatcacttcttcccatatcctttagctcaccattaattttccaggggaataagttcttgaaatggtcaagatgtaggtctttttcctagattgctgaaagagatattggacagtaagatctggtcaacagtcaagagtattcaggggtggagaatattatggttggcttacaaatgtcggacaataaaaggaagtaagtctatagtttgactataggcttaatttacgaccatacatacaccagtgttaaaatagaaggtgagtcctcatggacttaagaaatgaggctaaaagcccaactaatgaagatgaagacatttattggtaacatgcagatttttttcttttttggtaatggttatataataaatacattagattggtcacaaaaatatcctgattctttgcccctctctatatctgatctctttgcaatgtaaacttttagctctgcccatcaagagggaagtctatctccccagcccttgaatctggattgaccttgtgacttgtttggccaagagaagaatacaggagaagtgaccgtgtgccaattccaagcctaggcttcaaagggccttgtgcatttttataccacgtggcagaaccctacccaaccactgttaaacaagtctaaactaggcttgtggaagatgagagaccacattcagcagagataagtttttgtagctgagggcatcctaaactagccagtttccaaccaactgagtagttgaccacagacaaatgagtgaaagcagtcaaggcaagaactacgcagctgactggtagacttgtgcccaatgataaacactgatggttttaaaacactgaatctggtggtggtttgttacacagaaatagctaactgatacaatgtatgagtcatatatttaggaactaacatcagacctgatttctggattctagatactaagaattaataatataaaaaccaccatttactgattgagcactaactaggtatgaagcgatgagctaaatgtcttttctgctctgtgatgaatgacacccttaggggatcacatttggtactatgagttgaaatgccgagatggtgaaattctgacccccagtacctaagagtgtaaacttatttggaaatagggctttacagaggtaatcaagttaaaatgaggtcattaaggtagactctaatcaatatgactggctgtcttataaacaagcaagatttgaacacaaaaccggagacacaggaaagatgatgtaaaattacatggggagaagatggtcatgtgactggagatatgcatccataagccaaggaatgacaagggttgcaggttaaacaccagaagctaaaggaggcaaggaaaggctctcccctagaactaccagacaaagcatggccctgccaataccttaattttgggtttctagcctccaaaggtatgagatgataaactctattgttttatgccacctagcttttgctactttgttatggtgctcctaggaaaataatacaggggcaatggaggaattggcagctcacatttaaattataaagcaatttctaatgttcaaggactatgtggttgcatgagtgaaataatttatctcaatgtacaagatatattatctgtttatcattaagtagataatttttatgcatgaatcatcagataagttaacattgactcacagatctgatcttacacaattgctagtgctggtctagaacatgtatttttaaatcatctgatttcatttgcactactgtagagttttgtttgtttttaaataagatgtagacccaagataccaaactaaaggactactaggccagcgaccatttgacaaagccaggatattacttctgaggtggaaataacaaaatgacttcacagagggaagtggaagtatgtggatttcagagtttgaatatgccagtgttcatagatccacaaagagatataaatatatatgatagtaaagaactaagttttttccctaaagatcagactattacatgaaagaaaacaattctttttacacttaaagatgggctacacatttttttatcccagggccaacacactgttgaagtcaacatattctgtttcatcccggacaagccagccccactgatgtcaagcacacaaccttcttacctcaagcttttaaatagtattctgcctgaaatactcttctgcaaatattggctgaatccttcactgggattcaggcctctgctcaaatgtcatcttatcagagggatctcttatctccatcattttctgtatgtttatgctaggtttcatgcagacattcatgtatgtgcacaaaaaatgaaatgtaagcttatgagcaggggctctgttttgttcacttctatatctctagggcctaaaacactgcctggaacttaggatgttctcaataaatacttgaataaatgaatgatctgaattttaaaaaccaagaaatactagatgcctgatttctggctgattattctccttgtctttcaaacattcttaaacaagatcattttcttggccaaatgtgatatttttcttagacttcttcagcctttcttattgtgcatctgaattgatgatttgtctgccacaagtaactgcaaatggaaacaggtggttcactttcaatatggctaaactttcagagtattttttttgtatatatgaaaacacttacaaaaggcttacaatgcagtactcactggatttatgggccacagagaatcttagagatctcaacataaggtcaggacgatttcatggggctcatggtgtcctatgtttacaagccacaggcacctttcccacatgctcccttcctgttctgatgtcacttagttgatacatcattagggctggaagagatcataaagatcatctattctaatctaacaccctcattttacagttgagaaaatagatgaagaacatgtataaggctttcttaaattcatatggagagtgctgttgttttattgtggctatgatggtgcacatgcctgtgcctctgtgtttgcgtgtgtgtgtatgtgtgtgtgatatgaagtataagatgttgctagacgaaaatggatagaaacaaaaccctagtattttgagaatattgatacatcaggtgatatatatgtctagtcttaacaactgagtctaacctctttcgttggcaaaaacagaaatggaaggttgtgcccaaggcactcaggttgttaagggtatagccccacaatgataccgagaaactggtccagcctgtgtactacccgttcacagaagatactacagtctagcagttccaatttccattctcttccattgtgataaattattttttgtttcaaatgctgtttcccaattcttcctccaatggaaacaagatcaactgcttgctaatctattctcttctccaagctaaaaagaacaagatgttcatgttattctcccttctctaaagtctcattcttgatagtatctttcttttttttttctattgaagttagcatttatttttatttttatttttttattattatactttaagttttagggtacatgtgcacaatgtgcaggttagttacatatgcatacatgtgacatgctggcgcgcagcacccactaactcgtcatctagcattaggtatatctcccaatgctatccctcccccctccctccaccccacaacagtccccagagtgtgatgttccccttcctgtgtccatgtgctcccattgttcaattcccaaatatgagtgagaatatacggtgtttggttttttgttcttgtgatagtttactgagaatgatgatttccaatttcatccatgtccctacaaaggacatgaactcatcattttttatggctgcatagtattccacggtgtatatgtgccacattttcttaatccagtctatcattgttggacatttgggttggttccaagtctttgctattgtgaatagtgccgcgataaacatacgtgtgcatgtgtctttatagcagcatgatttatagtcctttgggtatatacccagtaatgggatggctgggtcaaatggtatttctagttctagatccctgaggaatcgccacactgatttccacaatggttgaactagtttacagtcccaccaacagtgtaaaagtgttcctatttctccacatcctctccagcacctgttgtttcctgcctttttaatgattgccattctaactggtgtgagatgatatctcattgtggttttgatttgcatttctctgatggccagtgatggtgagcgttttttcatgtgttttttggctgcataaatgtcttcttttgagaagtgtctgttcatgtccttcgcccactttttgatggggttgtttgtttctttcttgtaaatttgattgagttcattgtagattctggatattagccctgtgtcagatgagtaggttgtgaaaattttctcccattttgtgggttgcctgttcactctgctggtagtttcttttgctgtgcagaagctctttagtttaattagatcccatttgtcaattttggcttttgttgccattgcttttggtgttttagacatgaagtccttgcccgtgcctatgtcctgaggaagatctaccaagcaaatggaaaacaaaaaaaggcaggggttgcaatcctagtctctgataaaacagactttaaacaaacaaagatcaaaagagacaaagaaggccattacataatggtaaagggatcaattcagcaacaagagctaactatcctaaatatatatgcacccaatacaggagcacccagattcataaagcaagtcctgagtgacctacaaagagacttagactcccacacattaataatgggagactttaacaccccactgtcaacattagacagatcaacgaggcagaaagtcaacaaggatacccaggaattgaactcagctctgcaccaagcggacctaatagacatctacagaactctccaccccaaatcaacagaatatatatttttttcagcaccacaccacacctattccaaaattgactacatacttggaagtaaagctctcctcagcaaatgtaaaagaatagaaattataacaaactatctctcagaccacagtgcaatcaaactagaactcaggattaagaaactcactcaaaactgctcaactacatggaaactgaacaacctgctcctgaatgaccactgggtacataacgaaatgaaggcagaaataaagatgttctttgaaaccaacgagaacaaagacacaacataccagaatctctgggacacattcaaagcagtgtgtagagggaaatttatagcactaaatgcccacaagagaaagcaggaaagatgcaaaattgacaccctaacatcacaattagaagaactagaaaagcaagagcaaacacattcaaaagctagcagaaggcaagaaataactaaaatcagagcagaactgaaggaaatagagacatagaaaacccttcaaaaaattgatgaatccagaagctggttttttgaaaggatcaacaaaattgatagaccgctagcacgactaataaagaaaaaaagagagaagaatcaaatagacgcaataaaaaatgataaaggggatatcaccaccgatcccacagaaatacaaactaccatcagagaatactacaaacacctgtatgcaaataaactagaaaatctagaagaaatggataaattcctcaacacatacactctcccaagactaaaccaggaagaagttgaatctctgaatagaccaataacaggagctgaaattgtggcaataatcaatagcttaccaaccaaaaagagtccaggaccagatggattcacagccgaattctaccagaggtacaaggaggaactggtaccattccttctgaaactattccaatcaatagaaaaagatggaatccttcctaactcattttatgaggccagcatcatcctgataccaaagccgggcagagacacaaccaaaaaagagaattttagaccaatatccttgatgaacattgatgcaaaaatcctcagtaaaatactggcaaactgaattcagcaccacatccaaaagcttatccaccatggtcaagtgggcttcatccctgggatgcaaggatggttcaatatacacaaatcaataaatgtaatccagcatataaacagaaccaaagacaaaaaccacatgattatctcaattgatagtatctttctaatgttgatcttagtgggaatcagcaaaaattgataataatctgattaaatgcatttggaggactgtcttatgattcccatatatgcattctaatatgtcattttttttaagaacagaaacgtagctgacatacacttaacttatagaaatatttttaagttttcttcctaaaagatagctccatgaaaaggcagactgataaaatttaagacgatattgaagtttgtgtctagcaataattcatttctctgttcttttcaactagttcctttccctcacccatcttattttttgttaaaataaaaacttatgagcttttgatgtccaccatcaatttagacttaattgaaagccattttaagtctaattctttgtgcagataataccacagcagagaattataaacaaagcaattaccaccataatagccagaaataaattgattctttattttcatgttttgaaccaaatgcatgcataatttttgcctaattgtaaccatgctttcattaaaaaatataacagagggagtggcgtttttccaccatggtgtttggaaaatagagatcccaagctaatttcattgatttcccaatgtcctcaaatgaatgaagaggatggcttttccttccatatttcctctctcactctaggagcttaaggatctaatattgagtatgggccagttagcttgccgccaaagagaggttctcatttggcattcatgaaaagttcagcaggactagatgtgggtgagaggcaccactcacagatgtgctggtgcacaggccatgcatctggggacactgattcagcttttccatagatcctgtactcttgaacagtgctctctcattgatgtcttattttaagatatacgaaacatttcttaataatatacacaaaaatgagaaggataatcagaatgcaaattagcaatatttgagaaagcaaaataaaaaagaaattaatgaaaattcaatggaatgcataaaacggatccaggaatggatctagtttaacaaaaatatatcgtttttttctcaaatgcaaagaaactgattgagaaaagaactcttccaaataaacattcaagaattatctcaagaactctccaaaaatttaaaatgctcaatttatcatctcatatagacccttattgcccaaaatgtggtcctcgtaccaacagcactggcctcaccttagagcttgttagaaatgcaggatctcagggctcacctcatccttacttaatgagaatcagcagtttaacatgttccccaggggatttgtgtacactgaagtttgagatgccttggaccacaacatccttagatttgacacacttctggaagcatgattctccaatccattcaccatatcttccagatatggtgatggattcttgacacaatcattctatgagttttgttgatgtgacttaatccagaagtagatatcagagattatccatttgtgcagacaacctgcccaccctttagacaatctccacaaatgtagcttctcacaggcaagatcttatatcttgaagaattataattttctcggccaagggcctggactggactgaattatattttcagggtcttcaacaacctagggagcctgatggggacatgggtatatacagaagttctttcggcctctagcacagaagtaggcagggccaaagctcttcttagaaacgtgtttttaaaattctagatggaaaaccatagatggcacataaaattaatattgtgggccataaccaacatggaaaaataaaatagaatagccaagaacagagagaaatgaaataaaataaaatagaaaatataagagcgagacttatagcaaggaaaggtttttgttaaatttaatgttccaattatacatatatgtgtatgcatgtaccgagtctcaatgtaacacagttttctttcactgggcaccagtctaaagtgtggaaatcattgccttaggatatacttttgaatacactcttatggagagacatattagaaatgttcactcactgaatgttaagggaaaaaaggcttaatttctaatatttataggttatattttatattataatcttcagatgaaaatctataatgttatgtgttgtgatgtttcaccaaaattaatattcacagtttatacaaagatcataaaaataaattcatcattaacataatgtttcctcagacacatgagtgcctagtttaattttggaaatatgaggtttgagtatgaaacagaattttggaaatgctggtgctcatgattcctgaattgcaatagccactgacaaaagtgtcatgtccaatttctaagaagaaagccagatttaaagacccctccacaaaactccctgagcatgaaatctcttctaaaaatcaacattttattaattgagggtaaaagcattgaaaagatgcttatttgacttgccatcaggttcacatgaggtaatttaatggcaagaagtattctgaattttttaaaagaaaatttgtagagaacagcacagagaattctcttttaccacagggaagttctttctcataaaagtaaagggaaatcatttatgcctacagctttgaattcatgtaccaaatgcacgtggaattcagattttcactctgttctctttaaaagagctattttacaggaatatgagctgagaggcaatatggtactatgtttataactaggagcttgtgtataaaaagttgttttaaaatataaaatagtatcagaaccagtttagtaagtactcatttaaataaattaagattcattggattttcctaatctatagtatttggaagagtcattttatttccttctctaaaagttcaatgcttgttttttagtaaacattctagattaatatgtattcatacattttacttatgtcctcatacatatttaacttgattcttaatttaaattctgaaaataatctatacatgctgttaattaggcaaaatcagtacagatgtttgctatacttgatttttttaacagctaataactttggaaaagtttccagaggataggtagataatatagtctagatgtttttgcattctatgtatcaaggtgacatcagagaaacttctatggaagatgcatacaaatgatgttaaaattgtttcaatttatatttgctggttaaactaacttctactgaaagaaattttctttatggcacatgggaataaacactctggctgaactattaacaatgcagaaacacaacagtttaagaagaggagcattaaaacaatctgatttgggctttacaggatggagaaattcttaagggagccaaaggataatcatatattctaaaatacaggtgatcttctgtatatctagtcatagtttaaaattatttaagctacttattaaacatgattcagaactttaccatctaagcaaaaaaacatacaaacacttctgctccctggcaggacagaaaaaagttatgatagtacaccactcactgaggtcagaggcctaaaatagccagctataatcctttctggtagacttgcaaataaattatatttaccatattagaaaaaggattgcctttctgattagaagtgaaaggacagttatgcaatgagtatgaagagttgactcttgaagatagatgccaattgctttttaatatggtgtgtgtgtttctgtgtgtgtgtgtgtgtgtgtgcacgcattaagaatagcatgattttctgggtttctcctaaagagaagtttaatttgttaagtgtctaagttaaattgggatgcctgtacttcatggacctatggagacataattgtgcctgggacaggatgagtaattttcaggtttaagcctcctttgagtatttggatgcattggtgattgtaattactgctcacagctgaaaggttgaaaagccccagtgaacaattcattcattgtcttgttcacatctgggttaatgtttccttcttggagaactctgtaccagtctgttttttgcttcttgccacaagatagcaatgccaatttctctctgtttacttggaagatcttgaggctgatgcatcagtgctagccacaaattaatggaattctttccagctgcaatgttttcaaatcatcaaataataagccagtaacaccgaactgctttggctgtttttctcttaattgtgtgccattctcagagatgatgtaaacacagttactagttgaaatgaccataatatctaaggtattctaaagaaatagatgacaattttatggaacgcagtttttcaaaaaacaattcgttgtagtctgaagccagatggcatatcatctcataagagagagtattagaaaaagcaaaagtgctcacacttaacagaaaggtacagaggtcaagatctgaagtgaggaatccaatttccttctttggcttacgtctggcctgtgttcttagagttagcagtgtcatttcagctctgcattgagattaacctttggcaaaggattctgttggggaagatgctgtggcaggctcccagtgtccatctcaaagtgtaggctgagtttgaagccagatcacctggttagtctgagaacggaacatatgatgaatccaaccattatgttccaaatatgttccaaataaaaggagtcagaagatacatggacaaccgaggcagtctcagcattcctatggccttaagttgggaaaagaaacaaaacaaaacacatgaactaatatggctgaactgaaaggctctttggaatggcaacttttgacccttgagtcttaaaatctctgttgactcacctcataactttgtaccaaattggcagtctcaacatatttgttggatagatttccttctaacgttaatttgactctcagttcactttctttgaatcaatcaaaagcttctccacttttcaagaagttcaagttggtatctatgactttggccatagagtagtagtgttccacttggcctgtactttagaattgtctgaggagatgtgtgttaaattacattaaatttggcctaatcttcctctttatcttggctctgtacatagcaaattgcaacctaacttggtgtgtaaacaaactgtgacattacttaagagcacattcttgtgacaagtagctgagtctcaaacaatcacagcaaccaaactgcatccaatcacagactgccaactaatcagactatgtccctagatgacaaatgcctcatcataccatgtccaaataaggctaatgccaaactgtaaccaatcaagctgtttccacattttacttcctttttttttttttgtccatacatacttgcctgcttctactgctaggtggagctctctgaaattctactggttaagggtgctgcccaattcatgaatttttctttgctcaaaaaaaaaaaaatgctgctaaatttaattggtcaaaagttttgtcttttaacgtgtatgtaatatttgtgctggagtcacactcacagagattcagattcaatcattttggggtgaggcctgtttatcaatattctttattagcatctcaaatgattctaatgtctagcaaagattagaaattgctactctaaaagaaatccgaaacacctgaaatactgatgtaattgaaaggtgattgaaataaagaattttaactaattttgtgtgtatgcttgtgtacattcttaatttttatcttatacataaattttatacttaatttttatgcttgtgtatatacttaactttttatccccaagaagtcacctttctatcaagaaatattaatatcataaggtctaggtgcaaatatacctagaaaattgtttacttgtaggaatttaattttaaaatgtcttcaaatagtttaaaatccaaggtatgtacatatatgcacagtttagaacagcaagaataatagtgtgaatttatttaacctcactagtttcagtgaatttcataacttaacattatacgtgtctgttagtaggggtagggatttggacaaaaatataaaagaagtatgtgctgtagttgctgcattggaaaaaatgattaatgttttgcaagagggagataagatatatacataaaataattacacagaagtcaagtataaatagtctagaatagaaataaaattgtgccagaatttgcaacgcaagtgaactcgttttcccttgagctcatactcttttcattagtgttattgattgaggaaagaaacaaaatatgttgactctatgaaaaactggaagtttagaaagttcaagattattatttatttattagtaacagaagaaaataatcaccatataaaagctctaagaaaagaaaaaagaagtgagcacatgcaaagcgtggatgaatagaatagttgctggaaaatgtaacaatcctgaaatttgatgatgttgggcaatctggttctgtctaaaatatctgccaggcagaaattcttctttcaagcctgagcttgatgaaatcatatggttataaatcaagtccagaaatggaaattagcaaatggaccacatcctccaaatggttttgaaaaactattctgcctttctcaggaagaaatgtctgattatgcatgatctatcattttcaattctacaacataattcaaatcaacagtcttttcagcaaccacctaagcttttgaatgctcaaaaatttaattaaggatcatgagaaagtggtcacttgatttacaagcattttctcaatatcacaaatctaagatcctcctcttccactatagacatgccatcctttctttcatcagtgccttatcgattatgaaaatgtattgattaatgactttggtagggagaatttgataaatgtattaagttatactctggcttctcaatccccttgagggtttttgactaatggaaatgtcattggtacttctttctacaaaatatccttaattatcaattatctctacaaagtactctcctctacctggaacatccactggtctcactgttcttcctccttctagtaagctcccacacatcttgtaggatttagatctaataatatcttctctgtaaagtttccctaggactcacccacatctgatagagttaccttctttgtacttgctatatagcaaactgttgtgaaacaaattatgttatattttaattatttctttatgtgtgaatcctgatttctctgttttagtaagattatgatttcaagttctgtctaagttatatgttaatttaattcatcttcatgtaagtaaccccgctcactgtagacaaaatagaaactaaacagaaacaaaaagaaaaatacacccataaccccatcaaccacagataactaaataaaataaatacttagtgtatttacttccagaaatccatctggttcttttgagtttagacttttttttcagatatttgctcttttaaacaatatttgattaatatctttgtatgtgcacccgagcatacttatttagttgttttcttcagctaaatgttgagatggaaagcttctgaatcaaatgatatgaatttttttaaccattctgatttatattccaaactgacatcttgaaatgttattctgattactctctctttagtgaatgaaagttcccatgcactgtggagatattgtttacgtttctgtcttagttgaagggaagaggaacattttttattcattttgcatttccagttcctgtagcagtaaaggaagaaaggtgaacttatttttattgtcagggcagtgtacctgatctcagttttttaagccaggagttgcttagaaagcagattgattgctggctccattaatccacatcctcttctatatctttaccttgtggttgcctcatggagggcatatttcatttttcctccctttgatttgggactcagccctggctttgtccattgtcatgtagaaatgccaacttgccatttccagcctagtttcataggttttcatttgccttatgtttttgccattgtcagaagaagcatattccccaagccatagctgcctgtttgtctgagctgcagaaggaaacatggaaaaagacatgacaagctatatctgcaggctatatctaaattctctcacccacctgccccatgaatcagaatcctccatggactccacaggctaaactgccccaagagtccagtatagatggatgaagcctcagctgacctgtaatcatgtgtgagttataagtttattgctgctttaagttactgacctttggggtggtttatgcaatattgttgtcatttttccgatgaaatgttcccatggctatagacaactctctgttttccttcagagctacccaactataaaagagctccataaattccagtggtcaccttttctactctgtcttttggactcagggacttacgacatcatttggataacaagacctcatgaacttctcagtggaaagacaatgagtttctggaaagaaattggtttaaatattgcctctgcccactgtagttctgtgacacttaacatttcacttaatgtatctgatttttagtttcctctctctaaaatgaaggtaataaaagccttatctcatggggctatggtgaaaatcaaaatataaggtatacaaaaagcattcttaaatgctagtcaactcatctaagtatgctttttgtgaaaaacttagtatttagtaataataggtgcttagtacatttacatatttgcataataggttattcatttatttattttttcttttttttagtatactttaagttttagggtacatgtgcacaacgtgcaggtttgttacatatgtatacatgtgccatgttggtgtgctgcacccattaacttgtcatttaacattaggtatatctcctaatgctatccctcccccctccgcccaccccacaacaggccctggtgtgtgatgttccccttcctgtgtccatgtgttctcattgttcaattcccatctatgagtgagaacatgcagtgtttggttttttgtctttgcgacagtttgctgagaatgatggtttccagtttcatccacgtccctacaaaggacatgaactcatcctttttatggctgcatagaattccatggtgtatatgtgccacattttcttaatccagtctatcattgttggacatttgggttggttccaagtctttgctattgtgaatagtgccgcaataaacatatgtgtgcatgtgtctttatagcagcgtgatttataatcctttgggtatatacccagtaatgggatggctggatcaaatggtatttctagttctaaatccctgaggaatgccacactgacttccacaatggctgaactagtttacagtcccaccagcagtgtaaaagtgttcctatttctccacatcctctccagcacctgttgtttcctgactttttaataatcgccattctaactggtgtgagatgatatcgcattgtggttttgatttgcatttctctgatggccagtgatgatgagcattttttcatgtgtcttttggctgcataaatgtcttcttttgagaagtgtctgttcatatccttcgcccgcttgttgatggggttgtttgttttttttcttgtaaatttgtttgagttctttgtagattctggatattagccctttgtcagatgagtagattgcagaaattttctcccattctgtaggttgcctgttcactctgctggtagtttcttttactgtgcagaagctccttagtttaattagatcccatttgtcaattgtggcttttgttgccattgcttttggtgttttagacatgaagtccttgcccatgcctatgtcctgaatggtattgcctaggttttcttctagggtttttatggttttaggtctaacatgtaagtctttaatccatcttgaattagtttttgtataaggtgtaaggaagggatccagtttcagctttctgcatatggccagccagttttcccagcaccatttattaaatagggaatcctttccccatttcttgtttttgttgggtttgtcaaagatcagatagttgtagatatgtggcattatttctgagggctctgttctgttccatttgtctatatctctgttttggtaccggtaccatgctgttttggttactgtagccttgtagtgtagtttgaagtcaggtagtgtgatgcctccagctttgttcgtttggcttaggattgacttggcaatgcggtctcttttttggttccatatgaactttaaagtagttttttcaaattttgtgaagaaagtcattggtagcttgatggggatggcattgactctataaattaccttgggcagtatggccattttcacgatattgattcttcctacccatgagcatggaatgttcttccatttgtttgtatcctcttttatttcattgagcagtggtttgtagttctccttgaagaggtccttcacgtcccttgtaagttggattcctaggtattttattctctttgaagcaattgtgaatgggagttcactcatgatgtggctctctgtttatctgttattggtgtataagaatgcttgtgatttttgcacattgatttttttatcctgagactttgctgaagttgcctatcagcttaaggagattttgagctgagacgatggggttttctagatatacaatcatgtcatctgcaaacagggacaatttgacttcctcttttcctaattgaataccctttatttccttctcctgcctgattgccctggccagaacttccaacactatgttgaataggagtggtgagagagggataacagcttctgctgtgcgctggggaagctatcactgtgtgaatgttaggattagaagaaatattttatagtacaatcaagagctatccatgccataggaacactaatatctattgtaacacaatccctttataatttgaaaatacagttctttctctcttctttacattgatttttcttttttagctgctctacatttccttcacaaagttccaattcagagccttaatagtagaccacattttccaaaaacctgatccaaattctggctcatgcaggcaattgaatgattttgaatccagtggtttttacccacctatgaagttcatggtatagtttcacactcaccgaattattctttggatttgaatcatcagaattgtaaggattctttaaaataggcacaagtttaaaaaatgtacatgaccaggaactaaatttaattacattttctccagcaacgttataatttcaatgagtttaaatatataacattttaattagaagttttacaattaaaatagttttaattacaatttatttaatgttattgagtgggagttgtaggtgtaagaaaactcatacgatttgtacatttcagtgtccagtttagtgtaaaaacttaacgttttaagcccaatagtgtcatgaaaagtacactatatgagagatcatgtggctaacaaacaagacattaggccaagcccagttaatagcttcttaattctccctgtcctttctgcaagcaattttttaaaaacctaatttattatctcatgcctctgtttgctcattcaaaaaaataaaatgattgcacagtggtattcttaggggtaattataaatctgtgaagtaatttaagcaaccatcagaactatttaataacataagatatatttaaattgcttttattttattactgacactgtgagacttttaatttgtctgctaacattcccaaaccaatgaataaaatgcataattgttgttgttaaacttatcccagagacttgtactcagaccaattgaggcctgctcagtttgctagaattcacactgcgcagtttgctgagcatccatactataatgttccataaggcatttctagaagcttaaaatgccaaggcaaaaatacatgagaatcagtttgatgtttaaatgagtaactggtagacctgatgtccaggaatttctcctcaccctttctttgagtaatttgttgttggcagtgttttgtatatctccctattttgaattctatatagacaattatttatcctcaaaggaaagaaatacacataatttttaaaattgcaggaaagaaggtaatttggagcagatggaaaagtgcaactcagaacactgggctgattagaaaggaagtagggaccctgcacagggctactgatcaccaggattcatttctggccttcagtgactcctgaggaagggaaacgaagccagtcaacggaacccaccttataccacactcaaactcccagtggcattaaagaaaatgaaagcaaaaataaaataaagcccatccaagggacagcaacttcaaagattgaaggaacatcagcccatatagatgagaaagaaccagcacaagaacttggcaactcaaaaagccagagtgtattctcacctccaaatggccatactattttcccagcaatggttcttaaccaggttgaaatgactgaaatgacagaaatagaattcagaatatggataggaacaaagatcatcaacattcaggagaaatttcagactcaatccaaggaatataaagaaaacaatgaaatgatacaggagatgaaagacgaaatgaccattttaacaaagaatcaaattgatcttatggagctgaaaaactcacttcaagaatttcataatacaatcaaaaatattaacagcagaattgaccaaggtgaggaaaaaaatctcagggcttgaagaccagttctccaaaataactgtcacgcaaaaataaggacaaataataataaataagaataaacaaagcctctgagaaatagaggattatgtaaagagaccaggtctacaattcactggtgtccctgaaaaagaaggcaagaaagtacacaacttgggaaacatatttgaggatattgtccatgaacgtttccccaacctcattagaggcgccaacattcaaattcgggaaatgcagagaccccctgtgatatactatataagatctcaaagacacatagtgatcagatttgccaaggttgaaatgaaaaaaaaagaaaaaaaagggttaaaggcagctagaaagaaagcggacaggtcacatacaaatggaagcccattaggctaacagcagaacctttagccagaaaagatagggggcctatattcagcagtcttaaagaaaagaaattccaaccaaaagtttcatatccagccaaactaactcacaagtgaaggagaaataagatccctttcagaaaagtaaatgttaaagaaatccatgaccaccagacctgccttctaagaggtccttaagggagtgctaaacatagaagaggaagaccattaccagccaccacagaaacacacttaagtacgtagaccatccacgctataaagcaaccgtacaatcaagtcttcataataactagctaacaacacagtgaaaggatcaaacctgaacatatcaatattaatcttgaaagtaaactgactaaatgcccctattaaaaggcacagactggcaagttggataaagaagcaggactccactgtatgttgtcttcaagtgacccatcatacatacaatgacattcacaggctcgaagtaaagggatggaaaaaaaatctaagcaaatggaaaacagaaaaaagcaggagttgctattctaacttcagacaaaacagactttaaaccagcaatgatttaaaaagacaaagaagcacatgacataatggtaaagggttcaattcaacaagacctaactatcttaaatacctattacccaacacaggagtgcccagattcataaaacaagttgttagagacctataaagagacttggataatcacacaaaaatagtggggtacttcagcatctcactgacagtattagacagattactgaggcagaaaattaacagacatttaggacccgaatttgacatttaaccaaatggacctaacagacatccacagaactctctaccctcaaattccagaatattcgttcttctcatctgtacatggcacatactctaaaattgaccacacaattgttcataaaataatcctcagcaaatttttaaaaaatgaaaatatattaaccatgttctcagacaacagcacaataaaaactgaaatcaatactaacaaatagctcaaaacaatataattacatagaaattaaccagctcctgaatgacttgtgtgtaaacaataaaattaaggtagaaaccaaactaatgcaggaagagaaaattcttagaaactaatgagaacaaagatacaacataacagaatctgtgggatgctaaagcagtgtcaagagggaagtttatagtgctaaacacttacatcaaaaaattagaaagatctcaaattaacaacctaacatcacatctagagaaactggagaaacaagagaaaaccaaccccaaagcttgtggaaagcagttttgaggcttttctcaaaagaacttataacaattggctgggtgcggtggctcacgcctgtaattccagcactttgggaggccaaggtgggcagatcacctgagatcaggagttcgagaccagcctgaccaatatggagaaacaccgtctctactaaaaatacaaaattagctggtcactgtggtgcatgcctgtaatcccagctactagggaagctgaggcaggagaatcacttgaacccaggaggcggaggttttggtgagctgagattacgccattgcgctacagcctgggcaacaacagtgaaactctgtctcaaaataaagaaacaaaaacaaaagcaaaaacaaaattactatttgacccatcaatttcattactgggtgtgtattcaaaagaaaataaattgctttaccgataagacacacgcacttgtgtgttcattgcagcactattcagaagagcaaagagcaaagacatggaatcaaccaaggtgcccattaacagtggattgggtaaagaaaatgtgtacatacacaccatgaaatactacacagccataaaaaaacaacaagatcttgaccttttcaggaaaatcgatgcagtgggaggccattatcctaagcaacctaacacaggaagagaaaaccaaatactgcatattctcacttataagtgggagctaaacactgagtatccttggacacaaatacgggaacaacagacactggggcgtacttgagggtggaggttgggaagagggtgagggtcaaaaaaccgccaccactatgcttattccctgggtaatgaaataatctgcccagcaaacccctgtgacacgcagtttacctatataggagatctgcacatgtacattgaacctaaaataaaagttaaaaacaaaaaaagccagtcacaaaagttaaagaaacaaaaagttcaggttaaagataaaattttgagaaaaaaactgggcctttaaacatttagggatggtggtgggcaaggctatcttgctaggagaaggaaagtaaaaagtacagcttgaactataagagcaaaaagggtatgggcattaacagaaaatgaatgcttttatttccaaatggtagaatagataaagcattttttgacatcttctccacaggttgtcaaaaagtaaaaaaaaaaaaaaaaaaaaaatagtgggaaattttgtgtattagttcattattgcattgctttaataaaatacctgagactgggtaacttattaagcaaagacatttaactgtctcacagttctgcaggctttacagggagcatggtgctggcatctgctcagcttctggtgaagcctcagggagatctcaatcatggcaaaaggcaaagcaggagcaaacacatcacatggcaagaacagcagtgggggccgggtaggtgccacacacttttcaaccactagatctcgtgagaactcactaacacaaagatagcaccaagacatgagggatccacccttgtgatccaaacacttcccactcctaatacctgcaagagccttggaagtttattctctagagaaattggactagaaaaatctcagtgattaggaatgaggagccccgaagaggataagctggaggttttgtgttgattataataccatgaagtagaagtctttaaatcaaaaggtgagaactacctttcctgcctgtagtcctgcctttagatataccccttcccagacataacattggaggttaattttgtggagcaccaaaatgatctacagaaagaataccaggagattcatagttttgagctagcagcaaagatgctagtatctctacttggttctatgcaaagatgcagccatcttttcatctaatcacctgagagtcaacctcccctatgtacaaaccccacaaacataaataaagcttccattcaactatttgttgttttactgttaagtaaatggatgaacaagcaacatcagccatttgaggaaatcctactacagggaagatatggaacataacaaacaagaacaaagaagtctgaaaaagaagacgtaatatagggaagaaaagactgctttaaagaaattcttattaatcatgttaaaaagatatataaagatattataaccattgcatattaaaatgttgtcaaaatggaacaaagaatagaatgagatcttgtaaattaataataggattaaaattttaaaaaaagaagttttggaaaataaatttgagggaaatgtccaaattatagaaataaaaagaaaatgagatgtgttatagcagttataagaatactatcagatgattctaggtgacctaatacgcagttactaagtgtttgaaaagatgagaacagaaaaaatagggaggaggacattatcaacaaaataatgtaagaaaatttgtcaggtactagccatgagtggtagcacacacctctaattccagctactcaggaggctgaggtgagaggatcgcctgagtccaggagttcaagaagccagcctagcaacaatagcaagaatctttctctcaaaaatataaaattaaattaaaaaaaagaaaatttgtcagtgctaagggcattgaacttttccaccaagtattcactacagtgaataaaaaagtgactccaccaaagcaactttatcatgataattttatgaaacaagtgataaagagaaaattgtaataacctccaggggctgaagaaatgagaacataacaaagaataaagtgtaggaatggtatcagagagcaactagaatgcactggaataggtcttcaaaacttttagtgaaaatgattcctcaaaccataattgtatacctagcaaaactttcgttccagtgttaggacagagtaaagtcatttttagacatacaatgtcccaaaataatcctccctcacccaaccaagcactcaatctcaggaaactcccagaaaatatatttcaacaaaataaacaaataagacagaggcatattgggatccaaggaatcatatgtaagagaagcaaatagaatttacaacatgaagaaaaaggaactttctgcatgacaggtgttttggcctagagagcaaatagtccagaatgaaacaggatgttgaaggcctccaggaaaaatgcctctaagacaagagacacactggcaagtgatcagacaggactgccctggttgaaaggctgttttccaggatgcattatcagaacaactggagaatatgagaagcattaaacttaagcaagtgtaaaaattttctccagaatgcaaaaatatatactgactttagctcacagtttctcgaatagccttagccatactaagtctgcacagtggcctaggatgctttcagttgacatctcttccctcttccttcattcggggtcaagggtcaggtttccttcacagtctagtggctctccggcctcacctggatgctcttcattttctttcacacaagcactttcccttaaaatactacccacatgtgattctatctcagtgtctcttcttcagagggcatagctgacaaacctagcatctgctgtaaattcattatagtggatagaactgtaatattcggatatcacattttgtcttaattataatacatgttttctggtgcttttcccataaaaactcacataaaattcatcatatttaccctacaaggcagatactgttattattttcctcattctagaataagaaaactgaagcacacacagggtaaatgacttccataaggttgcacactagattggatccatgaaacctgcttgccggtctgttcttaaacattccattagctgcctcttaaacactatactgaggtctccctctaaaatccacatatatgaggctataatggttaaagactttcaacaggctttcaaatattttcattctgaacattattttttctcaggagagggtggaagtagtggtgttaatacaataacagttgctcttgggtatctagaagagctggtcctcatgcatcagtagctgataatggggatacactccaaggagctataactcagtgtatcaccaactatagtcacagtgtattgggtttaaaggtagcttccaaacagatgtctacatcttaatccctgcgaattttgccctacatgccaaagagtgaatattaccttagatggcaaaagatgtgattaaggatcttgagaagaggcatttatcctggattttatgggtgggccctcaatgtaatcatatatgtcctcacgagagagaggcatatggagttttgaggtagacacatggaggagaaggcaagctgaagccagagcaaagagaaatgcagccataagacaagggataactacagccaccaaaagctagaaacaaggacagtattctccccagagcctccggaaggagggtggccctgctgacaccttaattttgtacttccgtcctctagaactgtgagaaaatcaatgtctattgttttaagaaactaaagttgtggttatttgttacagtgaccctaggaaacttacacacatgttatgtataatattttccattgaacatcaaataagggttgactactcctccatgggccaagtatagaggacgcaggaaatatttctcaagaagagtgattttaaaattgagttttgaagggttcccttagttagaaaataaataaaaaggacattcaagaaggagaaatagcacaagtgaaggcataggaaagtgaaatgcgatggcttctggacagaaggtggttcagtggctctggattagagacatgggaagaagtcttgagagctgggcctggcaagtggaagcatgtgaagaagccttgaatggcatgctaaagcttttgacgtggtggtaatctgatagacaatgatgattaatcaaggctcttgggacaaaagtagtgataagatataatcatctggagctccatagaagtgggaactaggagatcagctaagagaattttgcaatagtctgatgagagggagaagagggaatgcacagttggccatggctgtagaataagattcaaggtgacagacctggatatatgtgggtactgaggaggaagaaagttgagaataacttggaagagtctacttccagatctgggtggaaagaaagtggcattgacaaaagagaatgcaaatgtggtagagggaacatttttgaaggaatgtaaagacaccctattatatggcaggataggtgatgtggtcagctttgtgtccccacccaaatctcttcttgaattttaatcctcataatccccataatccctacgtgtcaagggagagaccaggtgcaggtaaatgaacatcatgggcggggggtggttcccctatgctgttctggtgatagtgagtgagttctcacgagaccgaatggttttataaagggatcttcctctcttcactcagcaactctccttcctgccaccttgtgaagaaggtgccttgcttcgtcttcaccttctgccatgattgtaagtttcctgagtcctccccagctatgttgagctgtgagtcaattaaacctctttcctttataaattactcagtctccggcagttctttatagcagtatgaaaatggactaatacagtgggtattttatcagcccagtgaccttgaccactgcacctctctctgcttcagccttcttatctgcaaagcagagagtagaggcattgcaatgttatttgtctcacaaggatgatgtgaagatttaaagagataacatctgtgaaagtactttctaaaccattttaaaaaattatatgaaggtgagctaatttataatggcctctatctgggaagtgatcatcttttgggcatgcaggtggttaatgccacacaggtctggaaccaggggaggcagcagggcagcaggtccagatttgggcctcctcagcagccaggtgatatcaatcatctgatatccccacagggcagagaagagaaaaggctaatgcggagtccctaaaaattgctggctccttagatgtaatcagaaaataaaaacaaatgaagaaaagcagtatcatgtggaaagacaatcagagactggaggaaagatctttgagaaagtgcagggacgggcgttggctctctacatagtcctgttaatagcaacaggcgcagtagatctaaatagaagtaggcaagtttgatcacatgaggatatgtaagaaatagtcgaaagccatgtgtttctttcagaagctaggctctagggctcatttgtaagggtagctcaataccacttataagcttgtgctgaaaggggctggcttgcaaacgatacattcagcaagcccatgctgaagttctagttttttgtttattaattgaggtgaaattcacctaacataaaataaaccattgtaaaatgtataattcaattgtatttattcagtacatttataatgcaatgcaactattaatgctatctgttataggctcaaaacatttcatcacccccaaaaagaaaccctgtacctattaaacagtcacttgcactctcccctgccccaagcacctggcaacagataatttgctctctgttgccatggatgtatctgaatatatacccccaaataattgaaaacaggtattcaaacaaatacttgcatatgaacgaagatccaattttaaatgggcaactttgaaaaaaatcagtctgtaggtcagttaatcttagaaagtgagtctataaagaacaggctgggtggccacaatgcccattgaatttattaaaacctgtttttattttgtaccttagttcagactgttcttagtgccaaaagcagaatcagaagatcacaatggcttctagaaacaagatgaattaatatgaatggtgagttctgagtgagccaggtcataactttcagtaagaaaaacacagaatccaaatttcattgttttcagcttttgttttaactgttttataattgggaaattttgccctcaaatgaatactattggtaaataatcctttctaattgaaggcttaaaatgtctgggcaaaactaaaaatgactccctacccaaggtttagtaatagttaaggcattcaaacaggagcaggctgaagaatcgtcttcaggtttggtcttagcaaacctgcaattactcatctccccatccagacttaccctgaacaaagcaaagggtaaccaaagtgcattaatcgctcactgatgactcaagataaacaaaaaccttataatctttgtttcaaatagtgtgcattgagatacatagagagagagagaaaaaaaaaacagtccctcttaggtggtgaataaccatttacccatcagatcttctccaagtcaagagttccactgcctatgtcaggcttttggacaccgcacataaaacaaattaagctttattaacttagtggaatatttggaaatactaattttacaggtgcatgagagaaaactgcagttccaagtattagagtaccattaaatataatacactccgtatgcaggggcagttatttaatattaaaccaataaaacattaccagtgccggtgagagttttggttgttgacagcaggctaggtgtcccacagccatgccgtctttctgtttgcaggccaattttacacagctgctttcttctggaaatcatgcctcatttgaagccttcgcaagtatgacaaatagcctctctaagccttagcgacggtggagaaacttgaaaatatttaggagcatttattaactagaatatgaaagaagatttagttcaactgcagcttttgactgtgtggaggtcttgttattgtaagaaatgctatctgtttgggcgtgtatatcttttgcaggacactgtgtaaaattatcaccctgagggcaaagctaagtttaaactgcatagaaattctaacgttgatctataagtggacaaaattagaatcaagtctttactttcaaactcagctgtctggtggtactgctgatccacatgctgccattctacgtatcacaaatgtcagatagagctccttgtacagggagcttcaaatctgtgcaggaatttaggatttataggaaaaagatatagaaaaaaagaaagactaggtgctaattgaattgttcaaaccaggcttgcaacatgcaaagcacactgagactaaagtcaggagaggtggacccagctgttggagtttgggatgaataatggaggaagggaggacataggcaactggcaggggctaaggatggggtggggtggctctgtgcacacaacatgacatattttgagaaaaagtgaaccaatatggctaaagtggagagttcatgaaaagtccatggaggcaagtagaaggagagaaatgtagatacattgaatggtcccattacagaggctcttgaacaccaggataggatatagatcttttatttaactacaggaaatgtggggtgatgagggctttgggaacatgagtgtgacataagaaggaagggtttggggaaattccattacaacagcctcttagattaattgacatggagagaattgagaaatgcccagtatgcttagaggattgagtaatgagagacctgcacgaggttggaattggcagtgataaaaaggaatggaatgttttaaagaatcatttgaaagagagaaacattttgaaggaagtatttataggacctgagaactcactgggtgtagagagtgacgtgtgggcaggttcaggcggattctgggactttgagcccaggccacttaaacaacaaaataagaaaactcaaagagtaaactgacttggggaggaaaagatgagctcagtcagtgagatttctgaggaagactagagagctgtagcagaacagagacagaacccctttttggcttctagatatttagtgatagaagcagaagtgaagccaggggtgttaaagaatgggccaggatgtagtggaaaacaaaatcttttgtttcaaagcacctagtcaataaaaattactgcattgaggattgagaaaaagtcattgggtttcctgagtaaacagctatgcactattgctaggtaggtggggtgttggggggatccatttctgtaggttaaggaataaggggctgctttcaagatggaagccgtgaatagactccacttttgaagaaatgaaagttaaagcaaagagagaaacaagacaggcattttggtctaatagaagcatcaagagtacacatttttgacaaaagaaataagagtttaacttagataagggagaaatttaaaagaagaacatatcaaagacactaagtagagtgtgtatcatcttggaaggtaaaaaatcaagtattaataaagcagatcatgacttctaccaaggcagaaggtaattagagatgatggctgaaaacaacagcgagaaacatatatcaaaattaatagaagtatttgaaagagggaactgaataaccatatgaactaaatattctcagttacatagaaagtatgattgtctattggcactaaaaagtgggaaaaaaatttaacccctagtgaagtttcgtagaactattttgggagatttattttgttttgttttgtttttttgagatagagtctcactatcacccaggctggagtgcagtggcacaatctgggctcactgcagcctcaacctccccaggctcaagcgattctcctgtctcagcctcccgagtggctggaattacaggtgcccaccaccacgcctggctaatttttgtatttttagtagagatggggtttcaccatgttagccaggctggtctcgaactcctgaccccaagtgatccacccaccttggcctcccaaatttctgagattacaggtgtgaggcactgcactcccagccaggagatttattttgaatcaggagagttaatcagtttcctcttattctatcaggatttgctcatggtggcctggaggacactgttttgagaaaggttttctgggggcattccgactcaattgccaggatgaatcaacgatggttgccctgagcatgggactggggagtggcagctgcagtgttagccagcaggaggaactctcaggcaacaatgaatgtcaaagaacccagctccttagcagggttcgggaaacttgtgtttctcagaatggcacaggggtgaaaatacccaaggtgaaaagttgaagtgggaagtttagggtgttccagcagcctcagcatcactgaggagcttgttagaaatgcagatcctcaggttccactctggactcactgacaccaactcttcatttgaataatgtcccaatggaatcacgcacatccagttttgtaaagagcattgctgaggtcttcaatacaatgaccaaccacagggtttaagtagctgtggggaggagtcccagaaataaagaagaatacttatgtcagtgtttctttctttttattttttctcttcctgtgtgtgtttatatatatatacataaatgtttattacacgttaagttctagggtacgtgtgcacagtgtgcaggtttgttacatatgtatacatgtgccatgttggtgtgctgcacccattaactcgtcatgtacattatgtatatctcctaatgctatcccaacccgctcccctcaccccataacaggtcccggtgtgtgatgtcccccttcctgtgtccaaatgttctcattgttcaattcccacctatgagtgagaacatgcggtgtttgtttttttgtccttgtgatagtttgctgagaatgatgatttccaatttcatccatgtccctacaaaggacatgaactcatcattttttatggctgcatagtattccatggtgtgtatgtgccacattttcttaatccagtctatcattgttggacatttgggttggttccaagtctttgctattgtgaatagtgccgcaatgtcagtgtttcttaaggcatagtctccagataagctacatcttcaacacctcagaacttactgaaaatgcaaattctctgtccccactctagatctactgaatcagaaactttgggtgtagggcacaggaatatgtgtttaacaagcctttcagatgattcctttgttccctaaagtttaagaataacattctagatactactggtaaagtgtgcatacatagatcatgaacaggtgtaaaaggtgaagaaatttagcttaagagtttggaggcagaagggtgttaaaagttcaaaatgcaaaaaataaaaaagtaaaagccatcaacattactttatactaccaagggcttagctaaatcaaccaaggtggaggaggctgtttggcattgtcgacacagcaagcagctgtctggatgagtttttcatgattagtaggtaggcaaagcctttacttgagggagtgcattagtttaagagaaactgggtgatgaaaagattaaaacatacagtaaaacaccattcacatacatatagacaataaaattgcaaagtaagtaagccaagtccagtttggggtatttacaggctaactgaaaataatgatatttctgtaagccaagcaggactgcaactttagcaagctggttccctttttgtcagtaatcacacatatctgaaagtaaagtgattatattgttttagaaaattgttcgcaattctaagttctctatcatctactactagagaggacttccaccccaatccaaaggtagctaaaatggggctgtgggatagtggtatctctggagctgccactagtgaggaaagccagccggtgtcctctgtgcccatgtcccatgtagtagccccagttactactgtgtggccatttaaattttaattaataaaaattaaatttcattaagaattccttagacctgtcacattccatgtggtcaatagtcacttgtccaagcggccgccgtatcgaggaacgaggtttacagaacatttccaccatcacagaaagttctgttgcacagggattgagcttgtgattcaaaattcacaatgcaagctttgtctgaatcaggcttaccaaggagatgctttacagcagggctaacagcagatcccatttgtgaaaagggttgggtccggggtcctaaacactcgccatttccacctgctctgagtatacaaatgttttctagaaaacccctcaactactaggatgtggagacattctaagggggtcaggagatgacagtattttattcattttcttcttcatttttgctattgcacaggaaggacacagaaatcacccacaaggtgactttgattgacattccaggactctcttcataattttatttgcgtggttttgttttgctttgtttttgccaaggcctgttatagaaaaggtggctgtacttaatatttatttatttgtttgtttgtttatattttttattggaaaccaaacaagacaaatgaattttaaaccgtgactgatgagtagccagcagattctggtgcctggcggaggctgacttttcagacttggtttgaggcccttgcaaattttcagttatttttaacctgactttcatgaaagcagtctagaaagagaacagtattcacccagttttgctacataaatctctttgagggccttgttaggtacctttactttggttagacaaagcatgtcagaaaaagaaagaaaaaaaaaagacaaaaattattgatttgaagcttgaaactgctaccacctgaaggtgcggaagtcagacctaagacaataaaccttgaattaataggaagacctcgggacactttcatgcctcatggtaagacagactacaaaccttagggcttgaatctataactttgatattctgattttatagtaagaattcattagatatttatagaaataaaaggcctgagccagaataatgccacattcatcatatacaggtataaatccttgaataatctgaagttcggcaagtgacttttgctatacatatgcatatgcaaaagtatatatatgtgtgtatacatgtatatgtatatatgtatatacatgtacacacgcatatatgcctgaaaggcccctcaaagagatttatgtagcaaaactgggtgaatatatatatatgcaaagtctaagattaagaaaaggacattgccttgggagacttgacttttgagctgcccatggagtcttaggggcttatggcaacattttttgtttatcctttggtggtgttcccttgggtaaacacaaatacctctgtgcctcatctctcctgtgtttcccagaattttttttctcactcttgtcctgggaaaattaatgttctaagcctttctgatgaggcttccaacatcttccctgtgaatctttgtgaaaagctaagaggtcttttctgggcaattagcctcatataattttccaaattatatgtttagctctgacgtgtgtctctccaaagttggtgcactatttgtttatttggttctgaactgagagtggaaaggagtgcctcctgctgcaggtgatcctgagtgagccccagtgtgagcaaatcgtagcccgggaggaggtgctttaccagcacgtcctgtcaaggcgctttcacaatcttcatgaaaaatggaaagctaacattctttctttcttcttaattctcatcatttattccattttaaagtgaccaattccatggcatttagtacatttgcgatgttgttacaattactacctctatctagctccaaaatattccatcactctgaagtaaaacccttatccattaagcagtttctctccattgccccttcctccaagtttttggcaatgggttcatcaaagatttcttagataaacttagccatgctagtgtggtagtcagctaatctattacccttcctgccaaaaccttaactgttgtttcttagaaaccattaaggaataactggcaagagatagttaagttcttgcccattttaaaattgggttgtctgtctttttctcgttgagttttaagaggtgtatgtgtgtgcgtgtgtgtgtgtgtgtgtattttggatccttatcaagtatatgatttacaaagcttactctttcttgttattgagtttttgtttcaagtaccatctacaaagaaaggacttatctgatcgctctgtggtgtaattaggctcctttgtcattggctattcaacgactcaattataatttcttttgagatggggtctcactctgtcactcaggctggagtgcagtgaaacattcatagcttactgcagcctcaacctcctgggctcaggtgatccacccaccttagcctcctgagtagctggaaccacaggcacgtggcaccaagcccagcttatttatttatttatttattgtggagatggggtccctttatgttgcccaggctagactcaaactcctgggcttcaataatcctcccaccttggtatcccaaagtgctgggattacaggtatgagccaccaagcctggcctcaattataatgtactgatatacttgtactctttaaaattatcttgctaaattatgtctttcctctactggaatggggaaattaaatttgtttagcaatgttttattaatgcctggaacacagtatatcacttcaatgaaatgaacatatttatagaattttgattttgtaacaaaggaatctgctgaaaccaatgtcagtttgctcctacattatttgtctatggacaataatatccttcttttttttaaaacaaaattaacagcatctacactgtgtgattccactcacatctcttgagattattattgaatcttgaaggttccagtcaatggacaattggttaaatacaacactttttattcaattcttcactcatttattcatcaaatattttttgaattggataaacaatgagtaaatattgaatacataactgagttaataaaagagtagatttgttttcagttcactttaatgagaataagaataaactgaaaatattttaaaggaattatgcactttctgaaagcaatgtagaattctgttttccccattcatggatggtcttaaaaactccaatgttttattgcaactctggaagataatgaggaaaagtaatcatctcctgaaataccttttacttaatatgacatcttcaaggtgaaataaagtatggttcaggtgaaagaaaaggcaaccaaaacttgaaaaatatacgcagtgttgcgtggataaaatggtatgattataatattgaagatgttgcaaaggaaaaggagaaagagcagctacctgatatggtttggctgtgtctccactcaaatctcatcttgaattgcagctcccataattcccacgtgttgtgggagggacctggtaggagataattgaatcatcagggcggtttcccccatactgttctcgtggtaatgaataagtctcacaagatctgacgattttatgaagggtaacccctttcacttggctctcattctctcttgtctgccgccttataagcgtgcttttctccttccaccatgattgtgaggcctccccagccaagtagaactgtcagcccattaaatctctttcgcttttcttttttttttagactgagtctcgctctgtcccccaggctggagggcagtggcgcgatctcggctcactgcacgctctgcctcccgggttcacgccattctcctgcctcagcctcccgagtagctgggactacaggcgcccaccaccacgcccggctaattttttttgtgtgtgtgttttttagtagagatggggtttcaccgtgttagccaggatggtctcgatctcctgaccattgtgatcattgtgaccattgggaccattgtgatccacctgcctcagcctcccaaagtgctgggattacaggcgtgagccaccgtgccccgccaaatctctttttctttataaattacccagtctcgagtatgtctttatcagcagtgtgaaaacggactaatacactacctaaataaagcaatagactattctttccctctccatttcttatgggaagaaaggcagagagaagaaaaaagaaatgtgttcattttatgttaaaatcaagttttcatatcatttagtaagaaaaaaggtaaaatattctcattctcttccaccatattatagtgtgctataattcaccagtgatattctgcccctgcatcaataccactgaggtttttttttttaattctaaaatatgccataagtaacaccatagctctgcttgtgattctctaccttctcactcaaaaaacaaaaacaaaacataaacaagaaaggaaaagttgacaggtttggaggggaaaggggcaggtaatgaaatgtccagtggctgtgtatagtctgttctatttaaaagataattttttttgcagattatgattcttttatacagcatttagaattacagaattttggtgctatcatggatcttaaaatatctagtctgatttctttatttgggagacagtgtgcctcagaagttatgacatggaatttgatactacgtggatctgaatttaaatatcaactacacctcatgctgtgtgaccgaggcacattgcttcacctgtctgatgctcagtcaactctttgataaaacagaatcatctgtaggttttgtgaagagtaaatgagataatgcatataaatccttgagcccaatatctagtacattttaaacagtcagtattagttttatttattaattttttctgtgataccactccttcatccacccaaattatgtcacccctctttgcagtataaatttttactgtaaattttgcagatgcaatttttaccttaagattcccaaagtctcttgtggcttccctagaataaagtagtctgtttctcttctaaattactaaggcatttgctctgtggctttcttacaatataatacatctaacataacagtgggcttatttaaactacaagtccctagaatatgtttttatgctaataatccacataggatcttagacaatgtaacaatgaagagttttggaatgagtaaacagacggccattagaggtggaataaaagcatagagatgtgtgttattatgtatatctcaattcaattcattcattcattgaagaaataagtattgagtccctaccaacaacattccttgcctctctagccaacatctttgcagatgcaggtatagatacttacttttgaattgtgcttttcaaattattttggggacccaccaaaacattgaaataattgatccactggaagtcagataaattaacaggtcattaccatacagatgagaaaaaagggccttttaaattattaagcagatccaaataaccatacatttggaaagtacattgatcccagagtaaatctaccctctactacagtatttagcactattcttggatgggtagagtgagatcagcacatggactctactttatcttccagttgtatgtttaaagtgctgggaaaggctacacaacatgtagtattttcagacttctgatgttcttgcttctagccataagccaagatctattagacactctttctgaacatcccaagatgttgctgttgaaaattagacaggaaacagaagagctcttgcattttctgaccacgcaactcatactagacaaatggaatgactccaactgtgacccagcacttcctgcagacttgacttgccatttccttcacttcaggcttctttgattacatcacctggactcctttaccctgggtgaatggtaccttatatgactgtccctgttttgtattacctcacaggttatgctcccttgatgtttaggtgatgtgactcagagtataggatgaaaggccattttgtggttataatgagtgtctttacagggctctatgttttaaatatatatgggcagtactacaataatgccaacaattctggtatcagttttgtttaagaagttataaactcaatgacttaatatttttctgtattgaaaggatatgagggaattattaatgcaaatagccagacgtttctaaaggttctatttccaggtagataattaatgctgttcttaacatggtccttcatctgtgacaattttttaaattaaatttcttgtttcaagttagttgtagattcacattccattctaaaatataatacagaaaagtactgtgtaccctttacctagttgctctcagtagtaatatcttgcaggactataatataataccacaaccaggatactgacattgatgcaatccactgaatttattgacttttcagtattacttgtgataatgtgtagcaaagtgtgtgtacatgtgtacatacatacacatccatgcacatttaagtctatgtgattttatcacatgtgaaaatttgtatatcatcaccacagtcaagatacatacaattccacttccaaaataatttcttgtgttgttattcatgttctaggtaattgtttgcttttagtgttgagttttgagtgtactttatatatttttagatactagccttttgtgggatatgtagtctacaaacattttctccagctctattggttgctttcatccttttaatagggccttctgtagagcaaatgtttttaattttgatgaggtccaatttatcaattttttctttgacagactgtggttttggtgctgcctaagtactctgcttagtcctaaatcctgaaaaatttcttctttttctcaaagctttatagttatatgtttggcatttaagttcacgattcactttagttaatttttatgtaaattttggagttgaagttgaagttcatttgtggccaacagatgttcagttggtccattaccatatgttaaaaaagctatccatctcgcattgaattgcttttgtacgttcatcaaaattaagttacatttatgtatgtgagtctattctgggttttctgttttgtcatgttaaactaggtatctatccctctgccacattgtcttgttgtggctacagagtaagagtaaacaccaggccctgtgattcttcccactttactctcctttgtcaagattattttttaactgttctatgatctgcatttttctctatgcatcttagaaaaatcttgtccatgtctctaaataagttactggaacaacaaacaatatgaaaaataaattaagaaaacaatcttattaacaatagcattaaaaatactgaagagtagacttaaccatgaaagtgtgctggacatggtggctcatgcctgtaatcccagcactttgggtggccgaggcaggtggatcatttgaggtcaggaattcgagaccagtctggataacatgatgaaaccccatctctactaataatacaaaaattagctgggtgtggtggcacacgcttctaatcccagctactcgggaggctgaggcacgataatcgcttgaacccgggaggcagaggttgcagtgagctatgattgcaccactgcactccagcctgggtgacacagtaaaactgtgtgtctcaaaaaaaaaaaaaaaaaaaaaaaaaaagaaagtaagaaagtgaaagatttgtatgctgaaaactataaattattggtgaaaataaatgatgacaatacaaataaatagaaagatatttcatgttcatagattaaacaaaattactacctgaagtgatttaaaaatttcaatgaaaaccctataaaattccaatgtcctttttatagaaatagacaaaataatctcaaaaattcacataaaaccacaaaaaaaaaacccaaatgccaaagaaatctttagccaaaagaacagagttgggggcagtacattacctgatctcaaaaatattacaaagctatattaatgtaaaaaatgatactgacataaaaatagacatattgataaatgtaagtggagagacagcccagaaataaatttacacatttactctcaatcgatttttgacaaaggtgccaacaatacacaatggggaaagggaaatctcttcaataaatggtgttggaaaaactggatatccacatgcagaagaatgaaactggacccttttttaccatatacaaaaattaactcaaaatggattaaagacttaaatgtaagatgtgaatctctaaaactataagaaaacatggaggaaaatctccaagacattggcctgagcaataatttctttgatatgaccccaaaaacataggcaacaagcaaaaatggacaaatgagattacatcaaactaaaaagcttctccacagcaaaggaaataatagagtgaagacagaagccatggattgagagaacatatttgcaaatcatacatctgataagggaataatatccaaaatatgtaaggaactcaaacaacttaacagcaagaaaaccaataatcctatctaaaaatgggcaaaggacctgagtagatatttctcaaaagaagacatataaatagccaatagatatatgtgaaaatacagtcctagactagctaaaacaatcttgacaaaggaaagtaaagtggaaggaatcactgaacccagtgtttaggcttaccctatagccacagtaatgaagatgatgtggtatcagcagagggatagatacataattcaaagaaataaaatgaaacacccagaaatagacacaaacaaataagtctaacttaattttgacaaacatggaaaagcaatgcaatgggggaaaaaatctatttaacagatatacacaatggaatactattcagccttaaaaggaaaaaaaaatcctgttatttttgacaacatggctgaacctgaaggccactatgctaagtgaaataaaccaggcacataaagacaaacactgcatggtctcatacgtatgttaaatttttaaaagtcaaactaatagaagtagcaagtagactggttgttagcagaggctggcagggttgggggaaggtggtagatgaggaaaggaaagatgttggtcaagagtacaaagtttcgattaagagaaataagttgtattgaactatggcacaccatagtgactatagttaacaatattgtatatttcaaaattactgaaagagtagattttaaatgttctcaccacaaataaatgattattatgtgagttgatagatatgttaattagcttgattttatcattccacagtgcatacatacatcacaacgtcacattctaccccataaatatatatgtaattactatttgtcaattttttaaaagctgctggaattttgataggaaattgcataaaacctatatatcatttgggaagaattgacctctttattatattgagtcataaaatccatgagcattttttgtctttgacttctttcattggcattttataattttcagcatatttgtcctgtatatgttttgttaactttatatctaagtatttaattttctttgtagtgattgcaaacaatattgctttaaatttctgtttctacatattcattgttagtatacagaaataagattgatttttgggtatttattctatatcctgtaatcttgctgaagttcaattattagttctagaaaagtgtagattcttcctgattttatatgtaaataattatgtcatttgtaaacaggaatgggtttctttcttccttttccatctgtatggtttcatttctttttcttaccttattgcactggctagaacttccagtactagtaagagtaagagaggttagagcaaaagaggagtgctgacattcttatcttattcttgatcttatggggaaagcatttagcctttcaccagtaaacatttgagtattaagctacaggttgttttacagattttttttttcaaattgaggcatttccttcttattcctattttgctgagaatttttattgtgaatgagtgttcacaataaaactcttaaatcttgtcaaatgcgttttctgtgtcaactgacataatctcatatgctttttgcttgttagtgtattcacatgatgaactacactggattttgaagggatgttgaaacaaccttgaatacctaaaataaagtttacttggtcatggagtgtaattctttttaaacattgttgagtttaatttgctgtttctttgttgagaattttcacagccatattcatgagagatattggtctgtagtgtttcattttgttttgttttgtttttgctacaatttttgtctggtgtacatagcaacttcagtgatactggccttataaaatttgaaagatggtttttcttttattttctggaagagattgcataaaattggtgataattttttaatggtaacattttcctgtgaatggtagcactttccacctggcactgaagattttgttcaggagattttaaaaaagaaattcaactgatttaatagttgtaatagtattaagatgatttactctgttttgtgttttggttacattttaatacttggtggttttttgaagaattgaccaattcttttttttttttttttttttagatggagttttgctcttttgcccaggctggagcgaagtggtgcaatcttggctcactacaacctccgcctcctgggttcaagtgattctcctgtctcagcctcccgagtagctgggattacaggtgcccgccaccatgcccagctaattttggtatttttagtagagatggggtttcgccatgttggtcagtctggtctcaatctcctgatttcaagttatccaccagcctcagccccccaaagtgttaggactacaggcatgagccaccacacccggccaccaatttcttttaagttgacaaatttatcagggcaaagtttcttatagtcttctaatgtgctttaatagctacaggatcactacagatgctgacagagctttcaatgataacttatttcatttctaatattagttgtgtgtgtgtcttttctcactttatttttgtagtccttatagagttttatcaattttactaatttttaaaataactatctttgatttcacttttctattattttccttattttcaatttctttaatttctgtgtttatattcattattttccttccttacgctgctttgggtataatttttttctttcactagtttcttgatgtagaaacatagattaatgatttgaaattttttctctttgttaatataaatgtctagtgctataaatttgcctcacagaactgtattaacagcatcccacttttttatgttttatttttctgttactttgtttctatatatttttaattttttaaggcttcctctctgatccatgggttatttagaagaatgcaattcaatttctgtctataaatgtttctgtggtgtttctggtatttactgttgaaccaaaacattgtatgatttcaatttattttaatgttttgaggtataatctacgatccaggatatgaactgtcttggtgaatattgtgcattgtgaaaatgtgcattttgcttttgttatacctttattagatcttgttggttgattttgttgttcatgtcttctatattcttactgatttttttttgtctagtatttctaccacttgctgaaaataagatgttgaagtcctcagttataactgttaatttgtctattttttagctataccagtttttgattcatgtattatgaagctgttatttggtggcttcacatttagaattgttcttctactcttaattgttgccttcctgtgggttaaacatttttcaggatttcgtttttacttatagtattttccagtttgagtttgtatctttgtatagctgtcttagagtttactctgcgaattgcaacacacacatatggcttatcacagtctactgataaccaacattttaccacttcaagtaaagtgtgagaacctctcttgtatttagttctctttactttccctatttgaaacattattgtcttgagtatcaaatgggctttacagattttgattcagtcatcaaatataacttgtaaaactcatgaacagaagcatagtgtattgtatatgcccaggttcctattcattctactgctctttcttcttgaaaaccttctattaaccagttattaagaatatgtttctagtgacaattttttaaaaaaaattttccttcccttgagaatgtttttaaaacaaatttcccttaatttctgaagaatgattgcaatgattatggaatccatggctgatagttctttccttttatcagaggcatttaaaccagagtggctccattttgtgtagagtctgagtaaaatgaagctgagatctactgggctgcattcccaggaggttaggcattctaatcacaggaagagataggaggtcagcatgagatccaagtcataaagaccttgagagtgacctctggttgtctcactggtctttatatggtaattataatgcattagcatgctaaaagacactcccaccagcaccatgacagtttacaagtgccatggcaatgtcaggaagttactctatatggtctataaaggggaggtaccctcggttctgggaattgaccacgcctttcccaaaaatctcatgaataatccaccccttgtttagcatacaatcaggaagtaacaagaatccttggttgagcagctcaagctgctgctctgcctatggagtagccactccttatttcgttacttaataaatttgctttcactttactctatgaattcatctcaaattctttcttgagcaagatccgaaaaccctgccttggggtatggattgcgacacctttctggtaacactttcagcacttgaaaaatattgtatcacttctttctgggctccatgattttatataagaaatatactattattcaaatttgtgtttcctacagttaatgcattgattctctggatatgttcaagtttttttctctctcttaatttttcagaagtttcttttgaatattaattaaatttacacatcagatgcatatccaggctattgaacttatctctcaatttgcataataggtatgacaccgcttttgaaaagaaggaaatagaaaaaaatcccatcaatggtcttctttcatttttcctttccagacttcaaatgcacagatgatgctcttcacggtctatgtggactgaaaggcaaacttccagccactgacaaagcctttggccaacaataaacagtgatccgattttgatcctttctttgttatggtatctcttattttcattttctgatgctcctaatctcagtacagcagtttcttatcaggaagaactccaaaagtcagcttgttttgtaagtgaggatgcacacacagccttgagtgctgggagaggactggctgagtgggtgagtgtcagcctgttgcaagatagaagcccctccaagtgaagaaatgcaaaacaccataggattccaatcgactcagcatagagtagaggatgaggatgaggttttccttctttctagagcacatggacaaagacctgggttttttttaaatataagaacttaaatgaaagtttagatcattgtgactatgcctttgtgctacagtaagaatggcccttttcctttctggccacctttagatagcttattgagaacttatatgttagctagtatgctaaccactactccaatattcagtgtaggtctgttaataataacagtggtgatggtggtaatataatgatattttcttaataatagccagtagtgattgaacacttacactattctgtttgctttataaatattaacccatttcatctgcctgacagtgctaatagatggtaactactattatgcctgtcttaacaattgggaaactggagtgataatactaaataagttaatcaaggccacacagctgatagccagagaggctggaattcaaacttaagcagcattacaccataaaagatcttcttagctgttaagctataactactagacacttctatgactgtttaatcttttgtaaaatcaaggagttggaccacacaacaacaatgaaaataacacaacaacaacattacaacaaatataccagtaatggcgagtaaaattgactgaattcttactgtggtttaaaatctgggccatatgcttggtacgtatttttttcatatagctgttaccacattctatgtgggaagaaccattattatctgtattttatagtactgcagaaatgtgaggtgacttactaaatagtacacagcaaataagtggtggcatcaagattgaaatctaggtgttcatttttctctgcaggcaaaaaaaaaaagctctaaattagtcatttcctattagtacaacttttaccacaattaatatatgcagatttaaaccctcagttatgaatatctttctaaagatggaagcagcattcccttctgggccatttatccaaaattaagatattagaaatagaaagcagctacgatgagagataatcagagatggggttggcaaactacactgagctgcttgtcaccgcgtggaagacaggtttgttaggctgtcagcttaatggaagtttgactcttaagttaacctttgaacctacatcaagtcttcagaaaatcttagacagcaattttatttttctggactttttttttctttaaaagtggttcaaactggattgctatttaactgtggttttgaaaataaaaggaaaactggtataaatgacagcactgtccaaatacacatttggaaatccttctaattcccaaaaagaacagaagcttcaatctgataactgaaaataaggttctagtattctaaaggcagcatagttaataatctagagaagcaattcatgttttatttgaatataaacaagaacatctataaactcatcctttctataatcataaatttcaaaaactggtccataagtttatattttataaaaatagtgtttatatggctaaataaatatgcagtttaaacttaattaactcagtacagtttctcaggtatggcccacttaaagtggagttttaaatgcagatttaattatatgcatttatccaaacataaaatttcttctttacatttgagattcattttaatattttgaggaaaattagatcattttttattttggtagatttcaatcacactgtgaattttgatattcccactttaaaacattgcttttagtcacatctgctagattgagccctattaattttttatcatggaaacattagtacctgtgtttactcttgtttcatttatatttcaagtgaacaataaggtaatttggaatgaatgggaaactttatcgtgtgattatttaaaattttaccagcaggagtcaaatttttggtggccagtctgtaacaggaaatttataaaaggtcttcaagctctagggtttatgtggagctgcttgttctttgtcgaacaaatatttactgtgttcctactatgtgcaaaacactgcatatgaggtgatgggagggaggagtttcaaaagtgaatgagtgaggcaggatctaatcttactatctagttagagagaaaggatgataaagaacattcacaaacatgacatagggaaatatgtgattcgtcccatagacaagacacagataaaatattaaccgagtcttgagaaggcagaccagcctgggtgaccagagtagaactccaaagagtagggaatagtggaagatggcctggatttcaatccagtagagatggtggcccaggcacttcagccagagttatagctaaagccatggcataaaggagggaacacacaaaagtcttggaaaggaaagtatcagcaatctagagcagagagttgaataagaaggaggcataaccctattattaattattattcattagtaattagtgggaaaacctagttaaaggcgttgaagctttgtaaatggagaactactaaattatcagatcacaagaatggtatatctcaagtgatgtagaaagaataatttactaagagaatctcacagcgagccggagagagaagagacaaagaaagcagccatgtggctgttaacaatagagtgatggcatagagaacaggatacaaagttcaatatagaagatataacaaaggaagcataaatggaatttaacagaatatttgtgtgtttgcacgtgcatgtgtgtttgtgtgtgtgtgtgtattgctactagttacaagagggcagggttagcaagaaacagaagagtccctgggtcaagctctgtggtggaagataagacattgatttaaattctagttttattgaatttgaactgatagaaaacagagatgttgaaaaactagacatatagaaagggagttgagaccaaatctgatggaaattggagcattagttacctcagctctcagacctcaagttgtgcaggtgacttactcagttcaaatatgcctttcaattagggctcagaatatatttcagagcctgtgtatgaaaagaacacaaacattctgattagaatttagaggccaataactataatttgcattaaaccaatggcaagaatgatgccccaaattacagatacagattaatgaggataaaaaaaccttgtgtcctccttcttagtatgcacaaatgaatgtatttttatagtttcctggaaatttatcatgctttttcagaggcattagctctcattcaagtcttcttctcatttgtttccatcggtctccttttaatctattcacttcttaggaaattaacaacagtatggttaaagtcctgtcttagtcactcctgatatgaaggatattttcatgctcttatcttacactatcaattattctgtagcatttaataaaatataataagcataatatttttagtatttaaaaggtaaattgttttataaatttgcttcagtagaacaggttttaaacaaaatttccaattatttacatagataaatgaaaattgattataactgaaaaataaaagtgtcttacaaagaaatggatttttgacaacctcaagtaaacaataacgtacagacttttaaaggtaagacttgtcaatttagtaacaaaagaataaagttgttttctttctgagaactagattccaagatttctaacccgttctctcgtttagcccatgtcattttctcttgttttcttcccattttgtcagatttccatttgtgatctgtgtatccatgattgtttgaaaaaggagcccaggcttctagcccataaacatcacttctgctgtctcctgaatttatttaaatggctggtacttgagcccaggggattatttatgctaacaccatggagtcaagagtactcattaccaccactccaaactctccagaggtcaacaacatgaagcaggcccttcatgctttactacttcacgtcctaatctttctcagtccttcacttcccaacctttatgctttgggtcatcacttacacactttgttgatgagttaagtgaaatatatgtttgcagtctggtaaaaactacatttgcttttcccctcagctcactgtttgtattcatttgcatgctctttatcatcataaaaatcacaaattgccattgatctattatttttaaccagctctgaaaatctgtgtgccttcccactgcaaagagagataactcaaatttccaatttaacagatgaaaaatttttctgagaacaaattggatgaggccacttttctcatgtaaataaatggtagcatttttctttagatttttttaaagtcatgtttttatcaataaatttgaaggcaaactaaaagcctctgcatcaatgtatcttctgatgaaattttccatatgacagatcattttattatttaagtttaaaaaataacattaaactctatttaacttatgcaactgattactgtgaaaaaatattccctaggccatttatttttaaaagacttttccctctcactaaccaagaaaatatctatcacaattcattttggctttgaaaatgtttcccgtaaattttatctgttccaagtcaaagagttcctgaattacagagctcttacggtagaagctatgaatagtgatagggaatagaagttgtattctagttcagtagtggtacgctttccccttgggagataagcacatgcttggtgtgtagagattttccaacagttgcaaagaattcagtccttctcaaaggccattcctacctacaggcaggccattacctgcagtgctttccaccctgaaggacctatcagttgacttgatggtatgaccttggactcttaggggttattttctaattcctgattccctgccggggatgtgctggtcttttattccctagtataatgtctcacgcaggaacaggactgattgcttttcagagattaaggttgagtagagatcaggtctcagaattcacccatgaagagttctcttagggtaggccaagtggaaagccaactcccaatatgttatttagaagggttgggccctcctggtattgcccttgttctcctgtctcatttatgagtcaaaataaataataaaaaagtggtttctatctcgttcatccccacaaacctctccaactgagtgatggtaagctagagatgaaggagcacaggtcacagggaatacacagccgcagatcataggtggttcctgtagttaattcagagagctatagctacctttgtgagctcctaaatgcctctgtatatgtcatactatgggcagggcttacctgtctgcacaccctgtcactctatatacacccatgcagactttacaaatactgattctttttaaaaacctcattgtctaactagtaacagaatcatgataggtactttacaaatatttgttgaataaatgaatgcatgaatgtataacagtgtagggatgtctcagatacatctaaactggttgattggtttcaaattgtcgatatacagaagtggaatagacttagggatcaggagccaagagtgaaaccctcgccatatgtttactttcactccatgcctcagactctactgctccatttgaaagctgtcaccaacctcatagattcaaatgattctcattttaaatgtctaacaattgagctttgaaatatgttaaattaccatgtactaatgaggaatattaaataaaagcttagaaaggtcttttttttgtctttctgcctctaatatgtagtaagagattgactttccattaactttttattaattgaaagaatgaatgaaacacactccaagagttaataaaccaggaaaagagaacaaacagttctcatgcacactcacatgctttgaggtaccattttacatgttagaataattagtaactactcttacctaaattagggtaattactaggaaatgtttagttatttaaatttaattattactagtacttaaaaattaacaaaactgcatttatgaaagtctctataatgtagcttgacattatttaagaatgattttctatatcagatactgtgaattggtgaatttgagacggaacaagtacagagtacagcactcaacagtgcatgtgtgactattctcaggcttatatgaaactcctctattaaagattctttactcttctatgtcttggttttaggtttgatataaacaacatcgatgcttctatgtcctaaggtcaagtgatttctaaggctcgacccacaactcttgttttaaacatttcactcaggcctagcttaccttgtttcagcctctcaccacctaaataccttgagaaaacattcaccctagaaataagcactggcccttgcatatctgtatggggagagtgagaaaaaatagcttatttaagcaaactacaatttattcatttttattctacctggaattttttttgtttgcaatgtttccagtgctagaggatcatggctgtgtgtgtatgcatgtgttttggaagagaactggtctcattgagcagaaggctctcctgctttcacactaatctgatgaggactgaacttgccttagtgaaaatttgagaatcaaataaccctcattttcccagaggaatgataaagaagggccaccacataagctcagaaatgacaaataatatttcatagtttattagttatatgagatgttagcagtccattggtttttctcagtttttaagttccattcaggaaaaatcaactacttttcagctctatatgggcaacatttaatgcacctggaagttagagtggactttgtaaaatgccactttagtgtgcaggtcacccagttgacccatggagtatactgggttttgtgtcatataaataataattaacattgaaatagttttcatctttattaaatgttgtcttctgtcaaaagtaaataaatgaaatgtctgaggttataattcatagctaatgcatgaacaaattgagggcttacataaaaaatgtattaatatgtatctaaaaacatttttaagcaccaaaacaactcttaaatatattataaatgaacatatatgtgtatattgatgtgtatgtatatgtatatatacacataaatacacctacatatacatagatatccacacaagtatatcattatcattgatatatcaaatgtatcattaagtgaaaggttatagctacataaatatgtgtgtatatgtatgtgtgtgtgtgtgtgtgtgtgtacctgtatagaagaaagtgaaagaattcaaaagaaacaaattataagcgtaaattcaaaactgctgaaaaaacctgtcaaatcatcaatatgggtcaatgtctactttagacaataagccttaagaaccagattcttttaatacttccagtaaagtccaacgtgaacacttcctcctaagactctgaatataaattttgatccgcagtttgtattttcttctcctatttaaagaagcttttaaaaggagaatatgttgcattatgcaaagtatctatttgccctacaaacacatacagtactgtttagatggtaattaatctgaaaataagaaataaaaataccacacaaatactttggcaccttaaaaagagttggactcctttgaaaatgcctattgctataattatacaattattacaggcatttatatctaaggttctttcctctgaggtttctgttaggaaacattattggtctttctgtttttcttgaagagatctccattttcttgttattgtactattccaattgttcttttttctattgaagtttctgagcatttttctccttttcctcaagtgagtacatatcaaaactccagacaaactcacaatttaattgttgtcttttaaattaagcattaaatgtgcataaactcctgcctgttgggtgaagcttattcatttatctgggcatgctactgcatatccgttagcagagaaatgcaggcacctgccaaggtatttcatttaattaattgtttcctcaaaaccttttgcctaacgatatattttagagaaaaatttaacttatttgaagtatatgtaaaggcctagcgctggtgatgaaaacaaactttgagtgtgaccatattgtacaattattgataaaagattgatattattgactacactctctggaccttaacacaaacaataattgggagaatccattacaagatacaggtcaaataatatttactagtgaagatcattagaaattagtcatttagaactcgattgataggtatttttgcccatatttcttattttcaacttaattcataaggataggagtgtggctgggtttggtggctcacacttgtaatcccagcactttgggaggccaaggcaggaggattgcttgagcccaggagttctggaccaacctggtcaacaatagggagaccccgtctctattttttaaaaaatagccaggttagatggtgtactcctgtgatctgagctactttggcggttgaggtgggaggatttcttgatcccagaagtcaaacctgcagggagccataatcacaccactgcactccagcttttatgacagagtgagaccctgtcccctgcccctcaaaaaaaggacagtaagaatgtattcaaacaattcttcaatgttgaacaactttcattcaatgtatgtaccatatagaaaaagaacaacaaaggcttttctgtccaaggaaaattaaatccaaaggtgcttaccagatctgtggactggatcacttaataggagttagcaatctttggagaattggagatcaaagaaatggtcgtaaatgactgagtctgtattgtaaatgttcaagtgttgaactagcaagttttacattgattttaaaaattaatcactgcacaaattgctattagggaataagagacaaccaggagcaatggggtttgtacagcagcaataataccaactactgattgcacagcaaaaactagatctgtaccctcttttacctctgctaatttttatgacaaggttctctgttactatccttgttttacagatgaaaagagtaaaatgcactcattttaatcaatttgcaagagatctcataagcagaaagtaaacttgctagaattcagactccagccccccattagcagaaacatacatccctctttgatattttataaatttacaatatttatatatatggtttataataatagtatttgtaataattttacatacctttagttaaagaatatgattgcatacttattttaaaattttcaaataatgcaaaaatgtatagaacataaactgagtctaataaaattaaaaggtacttgatcagtattactctttaacttgtaaatactaagagaaacaattccataattgctttaggttagtccaatcttcagcaccaatgttcagtgtgataagatcattcgtaacttaccacgaaaagcaagtggaaaagtattttatcaaatggacatcactccaaatcaatggtacacacatggaaaggcaatgaacacttgagtttgctcagatttcaggactgggtcagctctttgcatgtgtgtggtgatacggtttggctgtgtccccacccaaatctcatcttgaattgtagttcccataatcatcacacgtcataggacggacccagttgaaagtaatttaatcatggggggtggtaatcctcatgctgttaccatggtggtaatcctcatgatagggagtgggttctcacgagatctgatggatttataagggacttttctcccttttgctcagtacttccctttgttgccactatgtgaaggacatgtttgcttccccttctgccatgattgtaagtttcctgaggcctccctagccctgcagaactgtgaatcaattaaacccctttcctttataaattacccagtcttgagtatttcttcatagcagcaggagaatggactgaaacagtaaattggtactacagagactggggtgctgctatagagatacaccaaaatgtggaagaaactttggaactgggtaataggcagaggttggaacagtttggagggctcaggagaagatgggagaatgtggcaaagtttggaacttcctagagacttggagggctcagaagacaggaaaatgtgggaaaggttggaacttcctggagacttgttgaatgggtttgaccaaaatgttgatagtgatatggacaatgaagtctaggctgaagtggtctcagatggagatgaggaatttgtcgggaaatgaaataaaggtgattcttgctatgctttagcaaagagactggcaacattatgcccctgtcctagagatctgtggaactttgaacttgagggacatgatttagggtacctggtggaaaaaatttctaagcagcaaagaaatcaagagtaagcagagcataaaagtttggaaagcttgtagcctggcaatgtaatagaaaagaaaaaccctgtaatcccagcactttgggaggccgaggtgggcggatcgtgaggtcaggagatcgagaccatcctggctaacacggtgaaaccccatctctacaaaaaatacaaaaaattagccgggtgtggtggcatgcacctgtagtcccagctactcgggaggctgaggcaggagaatggtgtgaacccaggaggcggaggttgcagtgagccgagatcatgccactgcactccagcctgggtgacagagcgagactccatctcaaaaaaacaaaaaaaaaacaaaaaaaaacaaaaaagaaaaaccaaatttctggggagaaattcaagctgactgaataaatttgcataagtaacaaagaaccaaagattagtcaccaagacaatggggaaaatgtttctagggcatgtcagggaccttcacagaagccacacccatcacagactttgaaggtctaggagggaaaaatgattttgtgggccaggcccagggctccctgactgtatgcagcttagggacttgatgcccttcatcccagctgttccagctatgactaaaaggggccaaggtacagctcaggttgtggattcagagagtgcaagccccaagatttgccagcttccacgtggtgtgagcctgcaggtggaattggggtttgggagcctccagctagatttcagaagttgcatagaaatgcctggatgtccaggcagaagtttgctacaggggtggagcccttagggaggacctctgctagggtagtgaagaagggaaatgtgggattagagtgcccacatagatgcccactggggcactgcctagtggagctgtgaaagacagtcactgtcctccagacctcagaatggtgttaaatttatccaccaacatcttgccttgtgtgcctggaaaagccacagatgctcaatgtgagcccatgaaagcatcagggaggggggctgtaccctgcaaagccacttgggcagaactgcccaaggttgtgggagcctacctcttgtattagcatgatctggttgtgagacatggagtcaaaggagatcattttggaatattaaggtttaatgactcccctgttggatttcatacttgcatggggcctgtagctcatttattttggttaatttctcccatttgggatgggtatatttgcccaatgcctctacacccattttatgtaggaagaaactaacttacttttgattttacaggctgataggcagaagggacttgccttgtctcagattagactttgcacttaaacttttgagttaatgctggaatgaattaagattttggggactgttggaatggtatgattgtgttttgaaatgtgaggacatgagatttgggaggcgtcaatatggaattatatggtttggctgtttccccatgcaaatctcatcttgaattgtagttcccataatccccacttgtcatgggagggacccagtaggagataatttaatcatgggggtggttaccttcatgctcttctcatgataaagagtgagttctcgcaagatctggcggctttataagggccttttcccccttttgcttggctcttcttgttgccaccatgtgaagaaggacatgtttgcttccccttctgccatttttgtaagtctcttgaggcctccccagccctgcagtactgtgagtcaattaaacctttttcctttataaattacccaatctcagatatttcttcctagcagtgtgagaacagactaatacacgtggttaaatacatgaggacaaaatgctgcactaaaaatccattttatggaagaagggtttttaaaatgattctactagattgtttttaagagccatgatgaagattggtatatatcatgagaggcactgatgatgtatgaaatgagaaagacatactgagtatctggaaaaacaaaatcaagacaaaaagcatctctgacttcttgtcaatccatcactttcaataatatgcctcttgctcttttaatttatcattggagaaaacagctaaatgtggaaatacaaggggatatgatcaaatgactgtcactgcctgaactggaaccagggccaaaatattatgactttttaaaaatatcaggttttcttaagaatattcaatactgatgaaagtggccaggttcctacaaatttatatttttctcaacacaattttcttaactcatcagattaaaaatatggatgatacgttattgaccacactttaaaaaatcacaagcaagtgttaaagacttttcagagacaaacactaaattgaagattaggattcaaattattgctttctcctaagaggaaacaatcttccagattttccatgtaatatgcttcttgacttagcttctagagagtgcttagaaggttaagaaacctagcattccaaatgggcattggaggactggagaagatagcacaatgactgaacaaaaggtacgtctagtgaaaccttttgtattttgtgctttcttgtcttttttttttttattgttgttttctgttgtgtgtgtgggtggaggaaaagggagtatggatgggtaggatgtgtgatcagctgttatcaatcaagtttggaaactcccttgtggtttggcatttctgaggactggcctggtcttcctcttggaaatcatccaatctccattggagggctctttgtttcaatagcaattcctgacaaacagaaattcacatggtatttttcatctttattattcttggatgaggcttattgattggctagatgtttataactgtgtcctctcctaaagagtggactgaaatctaagaacagcagtagtcattaacatctattagattttgtttcacacagcatattttgaatgagtggaatgcaatgtgaaaatttataccatcactaaattgctgcattgaattcaagatccatcttcttgacttaaaaaagtagaattagagaagtcgttcacaaccagtttagagtatcatggttgaattttcctttgagtttaaaactaaatgttaggttttgggggaagtcttacaaaaaactttaatagctgtcatttatgtatcttgtactgtattaaacttgtaaactgtatttgatttaattattatagtactcttagtacatactcttatccatatgattttgcaggtgaatctcagaaagattatttaaataactttctcaaggttacacagctagaaatgagaagagtcagcatttaaacctaggtctgtttgaccctatgtttctgcctctcattttgaagtcaagtgtagctatcctcccccattttcacctgccataaatggcaggaatgtcaccaattatttggggcttttttttttttcataagttttctacaaatgattgttactccagccacttatttacatgaaggaaaagtcagttgtagacacaggtataaaacctcaaaatgtcagcaagataacaaatagaaagggagcctgggcagctattgaatgaacattacacagaggcaatgcaggaggattctttgtaaaagataaaaagaatatcactaaacattcactcctaacatttaatctgagtcatttttagttgaataaaattggcacacaccacctgttgcctacagacagtttatagcatggggagatttccaaattcttgttaccgctttctccctttctctctctttcagatcctttaccttctcaccttccagaaacatgttaagtgcccttaaagcacagaccacttgacctcctttcctattcgtgtgtgtgtgtgtgtgtgtgtgtgtgtgtggtgtttactatgagctacagtgtttacgaattcagttttaatagggccagttgcaggactttcagtatgtgataactcctgaaaaagtggcgagaagattttattcttcccctcctcttcactttattttcaatcattagaggttgtgacttgaggcatttccttttattggctttttcctccatcatgatcaagaaactgatttatgccaaagtcagaatgagtcagacaataagaaaccaaagtgtatttggaccagggagcaaggatgtattgaaatgagtcccagcaaactctctgtttctgggtgtttaaccacatgcaaacaggatgggatggtggcttcacaagggtgtggttcttccacctctcctcccacaaactccccttcctctctttccccccgcatgtgtttcaaattggagcaatggtgggtgggagaagcaagagctgccctgtgaactataaatagtaaagccaagaattctgagtgttggaggaggggaggtggagggagatagcagggtgagggaggtgggaagctactcaaatgtaatcatttgcattgcttcaaaccaaaccaacttctgcagtatattaagagtatcgagtaaatatgtggccagcctcaaacccaacctgaaaaaaaagaagctataatggagatggtccctgatagatagtcacctcccttaactttttggaaaaatacagttatagtcagggctaatgtggaccaaaacccatggaaagattgatggaaattcatttttaaaaagccacacacatgaaaataatttacacaggaggctttctgcaccacagctgtgctgcttatttattttggaccagtttctgcaaaaagtggtacaaaaaaatggactcaattcttgcttgatagccttacgaatgtcaaattagtcccctgaactcaataccctctttcctgaataggctgttgtttaaaggaagatgggtcttcagtgtctccaggtattcatttctttagcatgtactttaaggctccaccctagaatctcataattttcaatctaagtaactcttggtcctatttctcctgcaacttaaatataccaaaagataaagagtgggagacagaggaatgtataggacaactgcttagtgtgtgagcctgcctctaccttagctggaagaggtacttataaagagtcctcctagacccatgaaagttatacaaaagaattatcttgagcatgattgccccaccccagaccatagacttcggaggatagtgttgtacctgctttgacgcttgctgaatttcctctaaacccctgagccaggatgaggcaagtggtttatgggagttccaatgcaccttgcagggcgggatatccattccaccttgaaattgagtagagcttggtgcctcaaagccagccaacacatgtgtgagggtgtgacatttatttaagggatttggagaccaaggcttcatacacatgcaatcagaggcttctggtgtcagtattctttgaattatcccctggcaaagaaggagatgtggattgatacatcaaaacttggcctttgtgtaaggggcatgtttgtatggttctaatctggttcatagtcatattcattattacgatttatccactgtctttcttctatgttgccaaagtgttccttggccaatctagaattatagtgaattaactcttttaggtcaatgcaaagttcatctcttaggttgcctccccataggatagacttgttttaaagaagaacttattccctcaagagatgcacttgtcatttattatgagagcttttgttatatctctaaagggagagatggctgttgaggttactttctgtgtctaacacagagccttagacataagaggtttaaggataatacacttcttttatggatcactgtattaaaacacaaggaaacaaaataatgcttataagtcatctagtttttctagaataagctttaaaatattgctgaatacattcaataacaccatccttttttcattgtacatgctacatgttgttgaaaatcaattttggcaggcattaaaactcccattgacccgggccaatatatttaactcaaccaggttgttttctctgatttacaattttctcttttttttttttttgccaagtttatattaaaagaattagaaaccataaagttaaaatcttacaaagcaagcatttttttcctccctcattaacctatcaatatagatgtcaagttctatttcatgagcagaacccttgcatgcacagccactgaagagtcagctcgctttaagttctcaaagaatttttcattgaatttaatatatttgataggctccactttacacaatgagaacagtagccttttctgttttccattttttttttagaaaaggaaagataataaagttgacctaatgagacccaggaaagttttgaactctctgaggtaatacatgagatatcgttagtaagactcctgtctgtttcttgtgagtgtatttgaattttaacttggtagttacaaaatgagaacctagacgctggatcaaaacctgaccttaagattaatcttatttttgcctcgagagacacaaacatgttcagcatgccaccttttgactgcagaaaattgatgtgactattcgccaaaataagcaaggcctccctctctgtatggcccgacttttttttttttctgggagtgggggaaaaatacatgacatcctcctgatggctccttgacagagttgatatataacggccttgaaaataggtcctagcccctaagtataaacccacaataaaagcaaaaagaaacaggctatctttccaccaggggacaacagacactctaatcgaaacaaccccaaagaaaatgattggatgtgtggctggccatgtctcttgtattctttttcttggtacccttagaacttttgtatccacagggaagtgttgccctttctcatggaatggtattggaaagagacataaacagcaataaaaaaaggctttgggattgaaagggaggaaaatagaaaaggttggtcacacaagtgagagggtttgggaatttaagcagttaattttgtagactgtgaactttgaaagctgtatgtgagacttaaatgtgtatgagagaaaaatagattttatttcttttgtagtcatcattcttgttattattgatacttcttgaacttcagtttcactatctgtaatttggatgtgtagcacttgccttctcattttatggtctgaggccccagtccccagcctttttggcacgagggaccagtttcgtgaaagacaatgtttgcacacaccagggaacgtgaggggtactggaccgcagcccaggggttgaggatctctgctctaaggccataagcaggtttttgtttttgatttaactaagaattccaggcacatttccctagtttaattatgccctgttcattgactgaatggaactaagtattttcaatagaattaaataaaaagagaagaaaaaacatactcaaaatgcttattcttttttcatgttcttatttctgttcaaagcagtagttctcaaccagggcaatattctcagcctacatccactccaccatggacatttgacaatgtctagagacacttttaattgccatgactgagtgtgtgtgaagggggacatgttgccactggtatctagtaggtagaatagacagtaatattctaaacatcttatgtagaacaggacagccccctcacaacaaagaattattggattatggatccacaatgtcaatagtgctgagattaagaaatcctatctcagagcagaaaaaaatgacggagtgaagctttacttttttttggaatgagttacattagtttaaatgatgtgctcaactaaaatctcatgctccaacataaagaaaaagttattattatgaataatggcatggttgctctatgtgagaaaaaatccaggatattaagagaataaggaaacaagagaccagaaatattatcattaaattttgccaaatctcagataatagaaaaaaggttagaattctacagatagatgtgccagttttcaaaaaggaaaaggaaaattctgagacctattggaagctgagtggtaacaagtagctaacatgatgtatttatgttatgatctttatctttcttttctttgcccagtggagcagaggcagtgtaagtggatttgagtgagacttggtttcttataactcagtaggctggggtaggggggatcactctttgtatataagtaacatttgagtggtcaatggattaattacaacttgaacagtaatgtctgtttccagttgtagggttttgtattaattcttttctgatctaatatttgttacagtaaagattactgatcaaattgaagatgacttgaaactgggagggttgcagaatcaagataaaaaagatgataacaaaataagaagagtatgccaataataatgacatgaactttaatgtaagttcctaaaactagtaacacaggaagaggttggaggagttgggtgtaaatagaagcttacatgaaaattgtttcagtaatttagtggactgcagcttcatattgagtccagattaacccacatgacttttgtttatataaccatctcaatgtctactgtcttatgtcaggaaaaacactgacaagctggagtatccagaggggaatggctaagctgggaactgccacatgatcaactattggaagtgctaggaaaacagagaccaggagaaatgagataactgttccaaactacataaaagactgctgggtaaaataaagtttgggttttagtgactgtcccaaaagaaaagcctaacgagctccagaaagcaaatttgaactcaaaatattcagctgtttgaaaatggaatcggtgccttccagtaagttccgtgtcaccagagcctaacaattaaatggcataatttttttaagaagctattcaactatcaataccaggaagatgctaaattatcttccaatttaggatttggcgatttttagatcattcataacagatataaacccaaaatacgttttagggtggtctgattctgtcaatatatgttaatgctattactttatgaagtagtttcaaattgcctacaaaaggatttcccaaagtagatgtcacagttgggcagggtctctttgtacttcacactcaaaattccatgaggaaaaaaaatgagattatggcatgctacattatttcttggatagtcaaaaagcatgttagcatgttagatagaggctctgaaaagtactgcaggtaaaattaaaaaaaaataaaacaaattattaaattcatcattgggtcattcaaagctcttcactgtttcctctttagtttttcaacctcaaagtccataatcctcctcgtgaaccctccactctagccacccagtaaaattctcattgaccttttccaccctgtggctcttgccatttcctttgcttgaaagtcttagttcctgtgtctgcccacaggggtcactcctcctgaaggcaaagccaaaatgaaattctcacttttgcacatactttagccttaaagtggttgcatttcatgcaatttacttattagagtctggtgacatatacttcatgaaatactctgatgtaccttacaacaccaacctggcatgatgtttctcacccagtaggtgtccaataaatgtttttggaattattaaaggaaacaaagacagttggaactcaagagattcatgctcagatcaatgtaaatatgcttaatattaagggaatagctttttataatccggacaagcaagtggaaaagaatactgtcaaacactgaaagccagccaggtgtggcggctcatgactgtaatcccagcactttgggaggctgaggagggtggatcacttgaagtcaggagttggagactagcatggccaacatggtgaaaccccatctctacaaaaattagccgggagtggtggcacaccagctactggggaagctgaggcatgataatcacttgaacccaggaggtggaggttgcagtgagctgagctcaagctactgcactccagcctgagcgacagagaaagactctatctcaaaacaaagcaaaacaaaataacacaacaacaaaaaacattgatagccttattttataaggtgaagcatcagtgtaatctatcttgtttttttaaaacaaacagcttgcagtcacccttcatccaaactagatgactgactcccaaatggaaaggtggctttgtagagctcactatatttcattgaatgatccgtgtttttgtttttgttattctgtttttaatatttgcttttcattagtggtatttggctatgcctctgcctatatctggacccctggattttcatcacaaactgttctaacttgatgattttgctctgtaaataaacaaaataatatattctaggtcttcttatcaacttgatccagagagagaatatatggcttttgactcagattttgaaggtcttgccctaaggagcttacataaggttctctaaacaccttaagtgacagagcctaattattttttttaagagttagcaagtaagaggaaattgtaaaaaaaaaaaaaaaaaaaaaaaaaagtaatgctttttttttaatactctctaattcttttatctccaggaaactttagttatctgtgtttaatattaatttcctttccaaaataattttaggtctattacctctcatttctttcccctatattttttaacttacagctcattatcagtaattaaatatattaattttctttctttctttttttttttttttcctagacagagtctcactctgtcacctaggctggagtgcagtagtgtgatctcggctcactgcaacctctgcttcccaagttcaggcgattctcctgcctcagcctccagagtagctcgggctacaggtgtgcaccaccatgcctggctaatttttagtagagatggggtttcaccattttgaccaggctggtcttgaacttctgacctcaggtgatctgcctgcctcagcctcccaaagtattgggattacaggtgtgagccaccctgcccaaccataaagaacaatagttattattaacaaattattccgaagtttaaattaagagaatgatgaaggcatttgtttagacaatattttatccaactcaacaagcatcattctgattgaaataaagtttgaaaataattgaggtttgaaaaattactcaagtggtttgtgtatacagaatacatacattgtgtcatgtcttcaaaaagaattcattaaagagttagttaggtcatatttttcttttctcctctttatttacagcatgaataccagtattaaggagcataattgtaattagtctaccatttcttagccttttagtggttaatatcaaatccctgaaaagctatgattaaatattcagacatgtctagtcaaatgccaagtgcgccaaaggtaaacaggaatagaaagaaaattatcttattttcattgaataaggaaatgtagctacaaggatgtgcaaatgaagaaactcaagtgcgcaattctaactatttaaaggactttgccatctatttccctcctaacaacattttagctggactccacatctagaagtgcatataccttccagataaggggttggaatggaggtgtgttgtaccctactaaattgttaaggatcttatctgaagaatgcccagccactggaataagtatgggactcacatcaagacatttgctcagtcaacatacaacttttagaggttgtatgcagttgcagtcccaggctgttatgacttttccttttggcttcaattcgatggttagttattcagccttattgttctcccactccttcaataggctaagggactcgccaccccaaaagtttcttaacatttctgtgactattttgttagaatcttttacccaccttcctttaagactgttgtgaagcatgattcagatccggcctgtcttgtgcttttcctcggtaaatataggaattcttagctttccggggaagtccatttgatctagacttttatatccctgtgctcatatctaactcagtgtctggttaagggaacctatagcatgtgtgttccacagaactcctagagtcctcaggactagcaaagagagtgcttacttatacatgcctctctcatcccctctcacctgccagggctatttctctgatcacagtctctactgatcactctaaggacacatctccacccctcgctgttctctcattgtccagggcattctcatttagtctcatctgggggagagaactgatgctttcttttgctctcttttcagtctatcattattaatgccataaagttttcattctgctttcttcagaaatttcttttttgattttctttctttccctcctcctgttccttttttctctacttcttttttttttttttttttttttgagacggagttttgttctatcgcctaggctggagtgcaatggcacgattttgactcactgtgacctctgcctaccgggttcaagtgattctcctacctcagcctcccaagaagctgggattacaggcatgcaccaccatgcctggctaattttagatttttagtagagttgggatttcaccatgttggtcaggctggtctcgaactcccaacatcagatgatctgcccacctcggcctcccaaagtgctggaattacagacctgagccaccatgccctgcccttttttctcttcttatctcaataagttttgcacctttaaaagcaaaatctgtgggtttcaaatatattgctttttttctcatgaaggcttcaagaatcatttttggatattaaaaaaattaagtattcacttaccctctttgcagctgtgacaatcctacatttatgaaactatggttgctaatggatgactaagaggtttatatggaaaggagtcaggagtaaaaagaatgaaaatagataataaattgctatattttattaaggaaacaaaagccattagttagaaactgactcttattaaccctccatcaaacttatatgcttgtctacatctgcctctaccagcttcctctctataaatatatttggaaggctgcctacttcctgccaaaagtaggttttatctttctgcttttgtttactcaaagactgatatgctttggctgtgtccccacccaaatctcatcttgaattgtagctctcataattcctatgtgtcatggaagggagccagtgagaggtaattgaatcatgggtgctggtctttcccatgcagttctcgtgatagtgaataagtctcatgagatctgatggttttataaaggggagtttccctaaacatgctctcttgcctgccaccatgtaagacatgcctttggctcctccttcgctttccgccatgattgtgaggtttccccacttaaaggtccattaaacctctttttctttataaattacccagtctcatatatgtctttattagcagtgtgagaatagactaatacaaagacttagtccttcaattatttcctctgttttctgcacaatcaagatcaattaaattctctctcttcaatggctgtttttttccgtttgtgtgcaaatgtgattccatcctacgaataaataagaaattaaatatttctttaaatcccttctgctatatctcttccatctcactttatccccccttccgccatttcttgctaccctttccatcaatagttctctaaaggataatgtggccactatgtctccacttcttcaccaccttttatacttaagtccactttgatctggggcccattctctggctccactagatctgctcttgtcaaggttactgatgatccccaatggccaaatcaaataacccttttctgccttacaattacttaatctcacatcagcaattcatctagttgttcatttctatctttcttctctttaatatcgcctgacattatacacctatcatggataaatcctttgctggcttttcttatttgcttgaactttaaactttgaagatttttttgagacatttctcctttttttcctcttctcctcttctctcctttcctatttttttctcttctcttctcctttaccatactcctctcctctcttttttgttttttgtcctctgatctcttctcttctcctatattctcaaattctcaaaatttatttgtggataacctcatccacatttgtggtttcaaaaaacattataggtagatgccataagagctaagacttgtgtcctttaatgttattaatgtcccactgtctaatgcaatgcctggaaaatagtgaattcttggattattcttctcagactgctgtaaccaaatgccgtagacttcgtggcttaaaaaagaatttatttcttacagttttggagactgtgaagtgtaatatcaaggtgccaggaagatagcttccattctgatgcctcttctcctagcttgcgggcagccaccatttcgctgagtgcttacaaaacttctttattcaggcacaaagagaaagagaacaatttgtctggtatctctttatatgagggcactaattcagtcaggtcattgtcttgacctcatgacctcatttaaccctaattgcctcccaaaggcctgatctccaaatgccatcacattggagactagggcttcaaagtataaactttggggggacacaaacagtacaaatacagttccccataaagggttttgagtaaaatactggttatttaaattaattaaagttaaattgaaatttgaaaatcagtttcctagttgcagtagccatgtttcatgtgctcaatagccacgtgtggttagtggacactattagagagcacggatacaggcatttccattatcacggaagtttctattgcacagagctgatcaagacattcacttctgggccgggctctgtggctcacgcctgtaatcccaacactttgggaggccgaggtgggcagatcacgagatcagaagttctagaccagcctggccaacatggtgaaatcccacctctactaaaaatacaaaaaattagctgggcatggtggtgggtgcctgtaatcccagctattcaggaggctgaggcaggagaatcgcttgaaccctggaggcggatgttgcagtgagccgagattgcgccactgcactccagtctgtgtgacagagaaagactccatcttgaaaaaaaaaaaaagatattcacttccagctttttagaactttacactgtacagaactatccattaatttacagtcttctttacttaaatgtgtcctcaaacattctcacttggatagctcaagaagttcttatcctttccctcaccactctctctaaaacaatctggtcctccttttgacctcccttgtttttctattttattagtatgttaatgagctgtgcattatccttgactccttcctttttctcatacaatgtgtgagcaaatcctatcagtagatgtctaacattccaccacttttctttatttccattttctttatcctggttcaagtcatcatcatccttttctggactattctggtcatttcctatcatttgcctgatttcgcttttgcctactccaataaaattttccacccagaactcaaagtgttcttctaaaaaggcaaatcagattataactttcccttgatgaaatattttttcaaccacattcaacagaaaaccaaaaccatcagcctggtccctacctacatctcccaccttatctccagccattcttctccttgatcactgcctccaatcccacctgcggtctctcatgtatgttacttctgactagggtcttctctcattcttttcttggctagatcctgctcatccttttcatttcacttaactgtgaccccaagatacctcctttgactgctgaacaattccttctcttttctctgtcaaataattccaaattctatcaatctgtaatattttatgaatatatttatagccttgttcagtttctcccttccttcctatgtatcctactttgaggtaaggaacctatcttctcactgttttattcctagtatttaatgcagtgcctgacagatagcaaattctcagcaaaagtttttgaacaaaccattgaatgaatgtgttttgccttatgaactaatgaatcagtgatgaataagagactgcagcaatgtcttactatgttaatcagtggatctcaggaatgcgttttgtcagtgtgagacacagccaatcagagaaccacaaaacatccagaaaatgacacagcagactttcacattgaatacaggatgcatccgatggctttttttcatgaaaaaaaaattgcctgataatttttggccaagctcaaaacaatgtgagtgactgaaaataactcattacacttcaagcatgtgaaaaattccaccagtataagcaaaatagtaataagtaaagaccaaataccttaacccagttctaaattactctattttccatttatatttgcagcctcaacaccagtatttcttctcacaagcccccttccagtcatttcagagcttactttcatagatgagtaactcactaaagggagcaatgctctcaccacagaccaagaccctagtgttaagaataaatttgattgcatcaactttgcttatcgtgagatatttgacatgattgttattaaaattgtcgactatgcaacccaactactgtgaatttgtgcccaggttctgccacttcctgagaatggaataattaattaatctttctaaatgtcatgtttcttttctgtgtaaatagaggtaacgtggtgttaatgatagcggtatctatgacatacatagagggattttttttgtcttttgtttttggttttttgtatgtgtatataaatgagaacctaaatgtaaagcacagaatcaggcatatagtcaatgctctataaatgttagctttaaaataagaggaaataaaataaaagcactctcttctgtttggatcattagaagaaaaaataaagattattgggagatggtgcatttttaatagaaaataattatttagcctacaaataaacctgtatagaaaactttatgcaaccaatactaattgtggaatgttagtttagaagatacagtttgtgtcatctaagaagttttggcattaatttgtttgtttcctactacacacccttaagtaaacatatagaattctcttttaaaatttcagaggctaggagtggtatgggtacgtgtgtgttggggggatgaagaaagattggtcagtgggcacaagcataaagttagattaaaaaaagaaataagttctaatgttccatagcagagtaaggtgaccatagttaacaacaacgtattgtatatttcaaaacagttagaagtcttgaaatatcctcaacacatagaaatgataaatgctgaaggtgctgagtatcagaaatactccaacttgattattacacattctctatgcatgtaacaaaacctcatatgtaccccattcatatgtacaggtattttgtgtgtgtgtgtgtgtgtgtgtgtgtgtgtgtgtgtgtgtgtgtataaaatattccagttttggtagtggagaaaaaagataacttctctctgtttcttttagtttataccctagcattgtttaaatacaaattataaataattaatttgacttactctatgaataaaaaagtatattttatactgctaccaacgatctttgaaaaatatgacttttgtgttgacaaagtccttttctcagttcggctctcttttgaatatctcagcatgcaatttaagaaatggtgatttaagtgcagtttttgaggtttttgtttccttttaaaaatgtgttttgatctgctcttgaaaagtcctaagtactgtttttattttccttccctcttgaggcccatgggtgacttagatgtaaaagccaatacagctttcattatggatagacagcagttctgaataatcctcaagttgtttttgtttttcagctattaacagcattttttgttgggggaggtggggactgtgggggtgcccttcctggacaatgtatgctgttgatcctcatttctgctttctacccattagatgccagtagcacctctcctagttctgacaaccaaaaatatcttcagactatgtcaatattcctagcatggggggtggccaaatgccctccattaaaagtcatggtcctaaaggatattcttctaagagaaactagtctgagataaaaagtttattttctctgtcagaggccagcttaaaacttgactttctcctccaagacttttatgactaactaactcaccgttctttcattctctatttagcacctttaaccttctttttacatttatgtaaatacttatcaggctattgttgttgctggatattattatttaatattatttatcctattgacctcctaactttttggaggtcaggagctattaaatattcattttatctaattttataaagaaggtaggcagtgaggcaaatctttatttaagtatcaaatgttaagtgtaaaaatatccacaaaagatctttgctcagctcactgagggagaacttataaaccagcatgcaaaatattgtcgaaccagattctttcaatttttacccctttaactatggaagttggttaattttattagaccagtatggttgcttttcactcacatcgagtatgctttggaaaggtttaatattagtacagccacctatataatttcaataaaaaaaaatagatgtgttgatgttgttttgaagtcaagtacaatagattgtgtctgagagtgagcagaggttataggtttggaacccggtcttaatttgggaagttaaattatacagctctggaagtaggagtaggtaatggaaagaaaagcacacttaaaatatgaaagaccttggatgcgattcttccctgttctgccctgggaagtccctctgaagtcaaagggaggtccctgaacccagccgggacaggagcaacctcgagacttgcatgaagacatccacttggatggctgttaagtggggctagtgaactcattcctaataaccagtcaactccttttagttcattttccaaggcaagattagatcatgttggaaaacctcactaaataaccttataaaaagagatgaactcactcccaattttcatcaggttctgaagcaaaaccataaaaaccactatcccacctcaggctactggaaacaaatttgcatttcattctcaggcacagaactatctctaggcaactatttctgtgagaggagttcctgtgttttttactttcttcagaaactcaccttgttggacacttgtgcaggtgacctatacggcctgctgccacacaggccagatgaagcttaaaagcagctcagggaatataggttcctagttgtgaaaagagtcatagctcttcaaactctgtcttccaataaataattgagatgatttggttacattacagtgagtcttcagttagtccatatgccaggactttttattatttgagaagtaatagtaactgttttccaatggacagaaactttttgtaaacgtagcctttccttaatttactaggcaagtggttgaggtggtgaaggctcttgcttgctaattgtcaaaagggcgagtgaatctcacaagcaaagagcatgtggctaggcagccataggtttttattcatgttaacggtactttattgaaatttgacttacattgagtaaaatgcatacattttacatatacagcttgatggatgctgaaaaatgtacatctttgtcactcagatcaccagaaacatttcacaatcccagaaacttcttttgtaccctttctgatccatgccctctttccttccaaagtcaactgagactctgaatttttattaacataaattagtttatttatttttcttgaattttatacatatggaattaaatattacatacctttttttctttttttggtctgggttctttggttcagcataatatttgtgagatttatctacaccactatgtgttttgattgtccttgtttattgctgatttcattcacacaattttgctgtatgactataccattgtgtaaaattcatgtatataatttttgtataaatgaaatttcctgtgaattaaatttatgttatgaccagtagaagcagttccacagataaaatgctgtgtccttctcagtacatcatattagaggctctggatgcttgttttttcaaatattggtgatgatcactttcatcatttgtttaaggtggtaactgtcatgtttctttgcattaaaattactattttcccattgtggggaagtttgtacaatttttatataaatgaatttcacacaatggtatattcataactagtatgccacaattagtttatctctttgtctaccattggtcatttgagggttttttttttttttggtttgggggctcttacaaatagtgctgctgtaattattcgtgtacaagtcaatttgtgaaatatatgcactcatttcttcagggtaaatccctggaggtgcaatgacaggtcatagggtaagtgtatgcttaacattagtagaaacttccaaacagttttctgaagtgattgtattattttatattctcaaatccataatttagaagaatgtgacctgcttcatatcttggccaacacatggcattgtcaatttctttttgatgggcatacgtagtgatttaacaagcctccagtgcccattccattcaagacagtagtatccatggacaaagaaggagactgctaaaggaatttaaaaaaatgtatttatatgagagatagcctcaatttgagatgaatacatagtatctctttaccactaaatatttgcatatatttcctaaaactaggatattctttaacacaattacagtataataatcaaaataaagaaatcattattaatttaatagtagtttctagtatacagagcttattcaaatcttttcatctgctttaacaatatcctttattgcaaagtacatgagtttttcttatccaggatccaatccaggagagatcattatagtgattggttctgtctctttttctttaatatagaacaattctatttttcttttatcaccttggaatctttggggaatatggaccagttgcttgatagaatgtctctcaatttggttttgcctaacgtgccctcttaattaaatttgtgtgataattgtggaagtagttccatagctagaatgctgtgttattctcagtatatcatattacaggctcaggattattattttttcaactattggtgatgatcactttcatcatttgtttaaggtagtgactgtcagatttctttgcactaaagttactattttccctttttagttactaaatgtcttgaaaggtgggacttgagaccataggaatatctatggtctatatctattcaacacccagtagacttagcactcactgttgatatttttctgaagcaatttttgctaaattgtttgacacattttgagcctctatatctatcgtatcttctgcatttcttacttggaattttactctaaggaagggttctttcttccctaccatttatttgtttatttgtttatttttgtatgaactcatagatttttattttatgctatggattatgacttttactatcattatttcttttgatgatcaaattttcctagatcctttaaagattttatcgttgaaatcattgtgacatcagatacttgcattaaaatgtcatcattagatgctgggtagctatgttatttcattgaatgacaaacagatcaatacatgatatatatattgagaaaaataggttaaatatagatattctagtattctatttaaatagaccttgttatgtagaataatgcccctaccccaaagatatctatgccttaatatcctaagcctgggaacatgttaacattacatggaaatagagactttgcagatggaattaaatttggtaatcagctcatctcagaaaagagagattattctggattattcaggagagaaaatgcaattacttcagcccttaaaagcagaagaggaagaggtcaaagagtcagagggagataaggtaggaggatgaatcaacttgccatcattactggctttgaagatgaaggcagacacaagccaaataagcaggtggcctctaagaagctagggatagccctcagttgatggtcaaccaggaaatggggacctcagacctacaaccaaaaggaacaggcttctgtcatcaagttgaatgagaaaggagacagattcttccctagagcctccagaaaggatcatagctttgccaacaccttgattacaaccccatgataccacaccagacttctcacctacagaactgaaaaataacacatttattttaagccaataaatttgtgataattcttataacagcaatagaaaactgatacataagactgtgtatgtgtatgagctatggtatttctttcttttttttgagacggagtttcactcttgttgcccaggctatagtgcaatggcaccatcttgggtcactgcaacctctgtctcccaggttcaagtgattctcatgcctcagcctcccgcgtagctgggattacaggtatgcgccaccacacccggtaattttgtacttttagtacagaccgggtttctccatgttggtcaggctggtcttgaactcccgatctcaggtgatctgcctgcctcagcctcccaaagtgctgggattacaggcatgagccaccgcacccggcctattgagtggtggctcatgagtgtgtatatgagtatatgagtgtgtatttctacacactattatgtattttctcagtctcattcttttactttgtctctcattctctgcatctctttacctctttttttgtttcagtccctattagtattcagtctctttccattagcatctattccattagtattacaaagactgcaattaatttgcaccaacctaatgctatgttttgcttctctctctccctctctctttatccacataatatattctacttgtggggcataataagtaatgtaaactctttgtgtgcaaaccaagaagatagtaacgcagtagtggaatgtcagtgatttgaattaacactggccaatctttgaacttttgaaagctggccacctaacctttctgcttttttccaatttgtttttgctgctcctttagtggaatcacctaaaatggtttttacttgagtattacataaaatatctccatagagcaacttttccaagccacacataacattcacatacttttctcaaaaggctttaatatagcaatcagtcttcttaaaaaaatagcgtatttccccccataacatggcttcattcctcaagcttgtggtaaacatgaataggctggaacaggtttaagtgcttaatggtaccctagacacaagtgaatattttcatttctaggtgagattggttggttgggaagatatctgtaaatttgtataattactatattctggagaagttgtggttaaattttattttcataaataaaaccacattttagagtgatgactggagtttgctgtatgaaaaaatcttatggtgaattgtttgttaatcatccgtttataatgtgctttgtgtgtatattatcttctctgtggataaatctgggctatcattattgggtttatttaaagtagaccacaactgtacttttgaaatttgtaagagatataatttgtaagagatattattttcagtgacctgttgaagtattaagcagatgttaaaaatgaagagagtttaaatttacctttcaaattaagaaaatatatttaatcatcacttttaacttgcaaacattgttccaaagatttctgtaagtctctaatcacaatgaaagttaaaaaaaaaaaaaagataatttattattctcttctttctggtccttgttcatctggccttttgtcatgcaactgaaatcatgtgactttgacttcagttttcacttttgctatattactgcaacaggtcaatataaacaaaacaactatgaactgcattcatgtgatgttgatactcttcaaattgttgtctgtacttttcattcttcagttatttatcatggtatatttcatattgaaagtttttattaaatgggaaagttatggcctttgagcccctgagaatttcaaaattcgaagctgctgggtcaaagagataagcctgttggcagaaatctataagtcattatacagtctataatagagacatagaaaaaatcacaatgggaacataaaggaggaaaactcagcttggggaagagaaacgtaatcttaggagatatcagttcaactgattcttcaagcagatacagaattttacgtggtgaaaatcgggaaagaggtgggagtgcatggcagaaggaataacatatgctaaagtagagatgagtaaaagacaatatcataattgcaaacagtagtttgaagtcactgaccacagagcttactatggaggtatagaaattataaaaggtaggcattttacttgtgttttctgaacagtccacacagactcatgtcattagctcatttagcacagtctaaatttcctgattagtattctttcaatttcccgtggtacatgctcatgggaaataggtgtacagtatattttagtttgttataggtaaaaccttggagcaatgcacctgttttatcatcctgcatctacccatagtcagaaagattgacttgtaatttacacaaaatataagttaaacttagcctctcactttgttgtcacatcttggttgctttctagcaagagcacctggactgtggtttctctgtagtttctcctttatgttagtttgatttatcggtcttgatcaaatcttattatttcagtcttgcactgtgtgatggtaaatctggtaagttattttgtatcaaagtatttgtaatttaaagtggcctaagggggttccaacatgtgtcaaataaagtttaacttttatagtaactagagactttaatgaatgttttaagttagaggattgattgttcaaagttagataagacaagctaaataaagatatctaggggaaaacaaagtggtcttttaaattgcattaataggttcattctagtaggtccttctgagatagattgggcaagtaagcaggaaaagaacttccagcaagcgcatctgggtttgaagtcaggacttgcatttaatcctgatgatgttacttttgttacagcacctctgtaccaaacagagagaggctgggagagaagtccattcctgcagggagaagtgttgtatgactgactctagaattcttggtatatggtgataataaaaagcaggaagattcttttttgttgttgtttgtttgttttttgtttttttgagacagagtctcactctgtcccccgggctggagtgcagtggcgggatctccgctcactgcaagctccgcctcccgggttcacgccattctcttgcctcagcctcccgagtagctgggactacagacgcctgccaccacgcccggctaattttttgtatttttagtagagacggggtttcacgtgttagccagggtggtctcgatctcctgacctcgtgatccgccctcctcggcctcccgaagtgctgggattacaggcttgagccaccgtgcccaggctaaaagcaggaagattcttatttggttttattattgctttttaagtgctttgaatataatttatctctgcctgctccagggtggacagctcctacatcttctcacccttgtatgctactggtcttttatatcaagacatagaactattttctcagcctttcactgggataaccttgtgatttgttttgatcagagggatgtctgagaagtgacacggtgccatttctgagcctagaccttaggagttcttgcgtgtttctctcctttccagtaaacttctatttttgcctccaataggctatcctgttggaggatgagactatatggaatagaaaatagctatccaaactcaggccatcctagaccatccaacccacagtcaacctggctgtagatcacagacacgtgcatgagcccagataagatgaggagaaccacccagctaagcccagcccaaattgttgacccacagaaattataaactaaagaaatgggtgttgttttaagccactaagttttgggatggattattatttggcaaaagctaatatatcccttaacctctcaacatcttagttttctcagtcaaaatgaaaatgaagaggcaataaatcaactaagtaagtctttacagatttactacatggattaagaacaaaattatattacttaatgaataaaatgtatttttaactttttgtcatcagttttattaatggaaatattttttcatagaaatcaccaaaaataaggaacaatatgttttagtttcttttctgttgctgtaactaaatatcacagattggatcatttgtaatgaatataaatttattcctgtggaacagctatggagtctggaaagtccaagatcctggtgatggcatctgacaaggaccttcttgctgtatcatagcagggcagaggcatggtagaagggcaaaggaacagatgacggaaagacaaagggcaagagagaaacagcaggggatcaaacttgtccttttataaggaacccacccttgtgataacaaatgcacccatgtaattgtagcataaatcattcatgcatataatcacctcttaaatgccccaccttttaatactgctacaatggctattaaatttcaatagaatgcaggaagggacaagtattcaaaccatagaattatattaataaatcttgtctagcttcctattctcaacaatttttattaaggtataatttacatacagtaaatcttactcttattaatgtatagttctttggattttggcaaatatacatagccatgtaaccaactgcacaatcaagacttattactgctcaatcatgctaaaaattattcataccttttgtggtctcatcccttccctctacccccaaactctgtcaaccagtaatctttatttcatccttacagttttctgcttttcagagtgtgcaatcaatagatttccagtcttttgagcctgacttcttttccttagcataatgcatctgcatttagtcatgttctttttaatcaatcattcatcctttatattactgagtattatttcattgtatagatatacaatttgttgatttgctctccagctggtggatatttggttgtttacaatttgagtgattccagatgaagccataaacattcatgtagaagcattttatgtgatcaaaaggttgaattttacttttttaaatacctaggaccggagttactgagcagatggtaaatgtatatttattttgataaaatatgtctaaattgttttacatagtggttgtattattttgcattccagtcagcactgtgtgttttccagttgctttgtgtctttgatggcatttggtatcgtcatttttgaagattttattttagccattctgataaagtaatggtttctgattgtggtttcaattttacctaattactaatgatgtacttcctaatatacgtatttgccatacacctaccttatgttatgaagtgcttcttcaaatctttgcttattttatattaggttgttaattgtattgggttttaattgttctttatatattctggaaccaattttttaaaatcagatatgtaatttgcatatagtctttgtatttttcattctagcatttcttagtttatagttaatgtagtgggataaaatgagcttgtcattctttagtttattttagtgtaatttttgctgaatgcttttaaagtaatttttagttggaataaaatgtatttgtgtgtgtatgtgtgtgtgtgtttgtgtagttacggttttgaatacacccatatattttttccacagtcccttcggaaggtggaacttaattcctctccctttaagtatgggctgaatttattctcttttaaataatttgtaaggcagaattgacaatgcatgactttcaagatgaggtcacaaaatgcactgtggtttcctttctgcactttcttgtattattcattctggtgaaacttagctgccattttgttaagacaccaagcattcctatggcagagccccacgtagtaaggaactgaggcatcctaccaataggcaaggagttgaagcctctaaccaactgccatataagtgagccatcttgaaagcagactttccattgtctgtcaaacctttaggtgactgcagtatcagctgtcatcttgcctgaaatttcatgagagatcttgagctgccatggtcactcaactaagctactaccagagttttaaccctccagatattaagtacttgatgttgtaagcagctaagttttggaaccatttgttacatagtgataaattatatatatacacatatatgtgtgtattttatatatcatatataatattcacatataaaattaatgtccatacaatttttacatggtaaatacaccctcgtaaatctaccagattaggaaatatcatagcacaagaatatcagaatgctatctgacctttcccagtaattatccacactattccttattaatgactactttcttgacaacataattcagttgcacttgattgtatattttatacaagtagaaccatacagtatggatccctttgcactggcttccttcatataacattatatttctaataattctttcaagttgtttcacatagtagtcatttcattatctctcattgccatatcttctgctgtgtatgtcacaatttatggctactctgttattggtgggcatgtgtattgtgtccagtttgagtgtcttaggaatagtactttgcacaattttgtacctgtattttggtaagcatttctctatggtacatgcctacaagtggaattgctggatcatgagttatatctatattatgtacacattcaagtaattttctgcagtggttataccagtttatacttccaccaatgatgtacgtatgttctacttgctccccacacaaaagatggtcagtgcttttaattttaactattctgatgggtatatattatggtttaatttgcatttcccttataactaatgaagttgaacgtattattatatatccattttgattatttggatatcctcttttgtgaaatacctctctcatcaattttgtattagctagtctctttttcttatagattggtgggaacttgtatacattctgtatacaagtcctttgtcaattatacatatggtatgtgtcttttcctactctacagctttcttattcatgctcctaatggtgtgttttaattatgggaacttctaaattttaatgtagtctaaaatgtatttatgtttttccgtttatggttaatgcatcttgtttaggatagtttgtgtactttaagatcacaagtatagtctcatgttttcttttaaaagtgttactgttttatagttcacatttggatgtaaaatcactcagttatttgttaattagtgtggtatgaaggtcaaaattcattttctttcatgtaaatatccagttaatccaacacaactaattgaaaagactatcctctccccactactatgcagtactgcctttgtcttactcaagtgtccatgtagatgtgtgtctgtttctgggtgctctgttatattatcctatttgtatatggttgtgccactaccgcaccattttatgtattgtagctgaataatatccttaaatctagtagtgtaagggtttcaaatatgctcttctacaaatttcctttttttatatatccttgaacttttacatttgaatatgcattttagaattagtctctgaatatacacacaaatacatacaatcaaataatatgaggaaattttgattagaattgaattaaacctgcagaataatttgagtatcctaatatattataagtatggcatatttctccatttactcttatcttcttatttctttttctgtgtagagttgttgaacagttttcattagtattattctaatttgtttgatttttaaggctattataaaaggtatattttataaacttcattttaacattttttgctgataaattgaaagcaataaattttttgtacattgaccttgtatctggatgtcatgataaatttacttaataataatcatatagtctctaaataaatacaatgttatccttttttcccctaattcttgtctgtttggttcactgtactttaagacctctagctcaatgttgaatggaaatgtgaatatacaacctttttttgttgtttttgaccttagtggaaacgtatcactattttatcattaggtgtgtgtaagtggatgtttgctttgagattttgtattatgttaggcatgttccttgcattcctaatttgttaagagttttatcatggataaattttggcttttatttttaacaattctgtaccttttgaaatgatcatgttttacacttattttgttaagacatagttcattgactgatttttgactggtaaaacccacattcccagaataaagtcaacttgatcattatacatgttttgaatttggatatcactgaatatggatttttaatgttttatttgaatttttgaatgcttatgagagagattggtttgaaatttttctttctgtaatttaccttagcaggttttgttatcaaggttatgatggcctcagaagatagtatctctctttatttattctcttaaagagtttgagtaaaattcaacctcttacttccttaagtacttataaaatttcctggtataaacatctcaccctgaaatttctttgtggtagggttttaaaatacagtttcaaatttgtaatagatatagaaatatttagatttttaaatttctctttaggcaattttgtatattacatttttctaggttttagtaacataaaactttaaatgtattaaaataaaactttcagtaatgtggaatctatagtgatatctcctttttgtttctgatgttggtgatttatgtattttctcataattcttgttgaatttatgtcttttcaaagaaacttttttgtggtataatcattttctatttcattaattttcacttttatatttattataccttacattctgttttctcttttgtttaatttggtatcattttaaagttcttaggcgctaaactgagataattgattctaaaccattttcctttttaaaatatatgtaaaagtctataaatttacttcaaaacagcattaactgtaacattttaatgtcctgttttcagtataatgtattttgtgatactttctaatttcctttttaattccagatatgatttgtgaaggtatttagaagtatattaatttatttccaaagatatgtatattttcttgcttttattttcattgatttcaaacttaataccactttgatcacagaataatatttgtcttactttaatccatgatatttgttgagaatttatatatgggccaagattcttatgtgcattttttaaaaaagaaaaaaaaaggtatgttctgcaaccattgatagcaatgttctctacatgacaattaggttaagtttgttaatgatattgtttaactatttttatattctttgtaattttcgtgtgcttttctaccagctacaaagacaattgtgtcagaatctctcaaaataaattctggtttgcttgttttttctcttatgttctgtcatttttctgcttttatgtattttcaagctatatacttagatacaaaataaaattgttttattttcttgaaggatcaaactctttttacattataaaacatccctttttatcttcaacatttctttctccttaaacttcattttgtctcttagtatatagccatgccactttttttttaattttggtttttagaatatacattttttcttatattttcttgtaaaccttcttattcttacaaaatgaacattttgagcaacatatagcaaagtcatgctctagttgtttttaaaatcattctgataattttggttaattatttattcaaattatattgaatggagttatttatatatatgctttatatctatcatcttattttttattctgtattacctttctttttttttttttgagacagtctcgctctgtcgccctgtattacctgtcttatagtctgtaagtttttactacttttttgccttttttggattaatcaagcaaggttttttattttcaccattttaccatgttaattatatattgttgagataacaatatccattctttacttactagagtctgttaaaatttattcctttgctacttctcagatatttgaggactttagaacacttgaacttccattacttctttctgtcatttttgcaatttttttcaaatattttaattatatgcgcaattcaaacccacaagacattgttatttttatttgtactatcaatattcgtttgcacttatgtatatattcactctttccattgcttttcagtcctttgttaatctccatgcctccatctaggataattttcttcctaaaaaaactcctgttaacactgacatgtaacattttgtgtagatacgctgatgaaaaataatttctagcattgtctgatttttaaaaattaagaatacttgtctgtgtgcagtagctcacacctgtaatcccaacactttgggagcctgggataggaggattacttgagcccaggaattggatactagcctgggcaacaaagcaagatcatgtctctacaaaaaaataaacattagccagacttagtagcatgggcctgtagttctagctacttaggaggctgaggtgggaggatcacttgagcctgggaggttgaagctggagtgagctgtgattttgccactgtattccagccagggtgacagagagagattcacagtttggaattctaagttagcaattattttccattatcactttgaagttttctactatgtttaatgaattattttatctgactaattttaacattatcttggttcttggttttagactaattttactattgtatgcctaggagtgtttctctttgtctacttatcctgcttggtgttcacagtacttttatgaatttttggcttgatgtttttcatttttgggggtaaaactcttagtcaatacatgttcacataatacttcttcactatctttccctctcttttttctaggacttcagttgcataattttttaagtttctatatatgtattatactcttttatatatttcattctgttttttaaatgctttagtttgagtattttttactgcttatcttttcttgcacaattttatgtttatcttcacctatgtttatctgttgttaaatgcatttattgaattgaattccttactttagtaaatgtgttattcagttctaagatttccacttagtttgtttcaaagatcctaaatatttttgcaaattctctgttttgtattttattttttgaaaatattaactagtatttaggactattgaggatatttcctaataactattttttcttttgatttttgatcactttgtcttgtcttatgttgtgaaaaataagtcttttttttttttttttttttttttttttttgagacggggtcgtgctctgtcgcccaggctggagtgcagtggcaggatctcagctcactgcaagctccgcctcccgggtcaatgccattctcctgcctcagccttcctagtagctgggactacaggcgcccaccaccactcctggctaattttttgtatttttagtagagaaggggtttcactgtgttagccaggatggtctcgatctcctgacctcgtgatccgcccacctcggcctcccaaagtgctgggattacaggcatgagccaccacacctggctccgaaaaataagtcttgattgcagtcaagaatttgtgaatgaaaatcctccagacaggatttatgcgtgcctttggcagacagtttggatagatgtggttaaagttaatctagcccaagactgggtggagtcaacctgggtttaatccttataatagtttgttaattttcgaccaggattaataactaagttttaagccttcagggatctcacctgaaagtctgagaaccatcaactctctttctccttggcaggtcctgaattctaaattcttctatacagctctggaagatttgcttctcagtcactttgccactattttcctcttggcttctctgtccctggattctctccctgcttgggtgtttagtgtctaggatcaaagactgggtcatagatgataatgtaatcatgagttatagatgacattgtctcctcctaatctccagaaaatgtttcacgcctgtatttacaatttatgaccctcaaaattatccctcctctgttcatcctctgaaatatctcttcattgtgtttagaattttgtaaaaagataagtagagccctaacataaaccctattgtgtatctcaataaagcatcctgccaagttatttgtaagcatttgatttgggcatattttagaaagccataacatgtgttgttggtatactatatttgattaaaccatttagtatatcacatctataaccatttttcttccacacttgcagacaaactcttgatcttcaaagctgtactagatgataacgctgcttccatatgaacatgcaatccaacttttaacattttgatttcaatgcctttttggaagactttaatttcctaggattgaacaaaatgacattgacgctatacttaaattcctgttctaggttaaaattaaagttttagtaatttagaaaaattatgcagaatttttacctcagcaaagattgccaaactccacacctggagagtaagacaggttcctgagtataagattcgagcactgtctagtggttttttgttgctgactactttctgtttgctctcctataactcttccccaccctactttttccttctttgtagcctgtgaaactgacttttgcaatcatcacttggggtttctggtttcctggcttcctatctgttcaaccaatgagatgctggtaggaaatagaagggtaggaatagaaggatgtcaaggtattccttcccttgcatattctctatctcagctcagaagttgtggtaataatgtgtctttctttaaagaaagcttcaaatatctgtgggttctggtattagcaattcctccctttgtcccttcatatctagggatagtaatatttccttgggtatccagatatctttttgtttatttgctgattattggccatatcctaattaatatttcttttgtgttaagctgtttgtgttatcataaagaaatacccgaggctgggtgatttataaagaaaaaaggtttaattggctcatggttctttctgtaggctgtacagaaagcatagtgttggcatctgactctgttgagggcttcaaaatctcacaatcatggaaggcagagggagagcagacaatgccacatgccaagagtggaagccaagaacagaagggaaagtttccagattctttttaaacaaccagatcttgcattaacgaactgagagagaactcgattgtcatgaaggagatggtgctaagccattcatgagggacctaccccccatgatctaatcacctcccaccagaccctgactccaacatgggaatcacatttcaacatgacatttagagtgggcaaacatctaaaccatatcattctgctccagaccccctaaatcttgtgttcttctcacatttcaaaatacaataatcccattgctgtagtcccccaagtttcagcattaactccaaagtcccaagtacaaggtctcatttgaaattgaagacaagttccttccacctatgaacctataaaatcaaaaccaagtcgtttactcataagatacaatggtggtataagctgcctagagagattagcatgactaaacgggagccaagtgctgatatctaagacaatgggaaaaaaaacttcagagggctcaagccataagccttgggacactgcttcacatcctctgaaatacggggagaagctgccaatggcagcacaagctgcctagagagattagcataatcaaaagggagccaagtgttaatatccaaaaaaaaaaaaaaaatggggaaaaggctacactccagaggcctcaaaccataagccttgggacaccgtctctttggagtggaatgtattcccactccaaaagggaggaattcaccaaaaggatggaaaaatcagccccacacaagtctgaaaaccagcagggagataattaaatcttaaatttccaaataacccctggatgtcccacatccagggcacactgttgtaaggggtgggcttccaagacttaacacctctgcccctgtggctttgcagggtgcagatcctgtggctgctgtcacaaattgaagttaaatgcctatggcttttccacacacaaggtgccagctgcctgtggatctagcattctcaggtctgaaaggtgacttccccctttacacagctccattaggcagtaccccagcagggactgcgtgggagccccaaccccacattttctcttggcattgccttagcagagtatctctgcagggcctctgcctctgctgcaggcttctacttgggcacataggttttctaatacatcctctgacatctagagagaagctgccaagccaccttcatgcttgcattctgtatgcccgcagacttaacaccatgtgaaagctgccaaggcttatggcttgaggcatctggaatggtggcttgagctgttcctggggccctttgagttgtgtctgtgtctggagcagccaagatgcatggaacagggtcccaaggcttatggcttgagccctctggaatagtggctttttatccattgtcttggatattagcacttggttcccttttagtcgtgataaactctctagcaagtggttacctcacagtctgcttggattctttctgtaccacagggacagcttatacattttccaaacatttatgctctgcttcccttttaaatgtaagttataactttattataagtcatttctttgatcccatatctgattgcaggctgttagaagcaccacctctaacattttacttcttgaaaactttactgcttagaaatttctttcaccagataccctaagtcctcactcttaaattcaaacttccagagatttctagggcatgaacacaatgcagccagattcttttctatgacataacatggtgacctttactccagttcccagtaattcccatttctgtttgagacctcatcagcctagcctgcactgtccatatttctatcagcgttttgattacaaccagttaaccaatctctaataaataccagactttcccttatcttcctgtattcttctgagccctctaaactcttctatcttctacccatttcccagttccaaagccacttcaacattttcaggcatctttatagaaacaccccactcttcagtaccagttttctatgttaggccatttgcattactctaagggaatacctgaggctgggtaatttataaagaaaggaggtttaattggctcatggttctgtgggctctacgggtaattgcctttgctgagggcctcaggtagcttgcaatcatgacagaaggcaaagtgggattaggcttattagatgatgagagcaggtgcaagacagacaagggagaggtcccagactcttctttaaacaccagatcctgcatgatctaactgagcacaaaatcacttattagtaaggaaatggtgctaaaccactcatgaggatcttcctgcatgatccaatacctctcagaaggtcccacctctaacactggaaatcacatttcaacatgagatttggaggggacacaaatccatacaatatcacttttaattgaggactctttaaaataccaggtgaaggttgtgcaaaaggattccagacaaaaagaagatgaggacaaggtgttgaggcttgaaagggcttggcatgttctaggaaggagtataaacccagggatcttgagcagtaggagcaaatgagaaagtagcatgagatgtgcttaaaggaactgtcaagcgtaaaatcatgcagagcctggttagtcagaataaggagtttttatttaatttgaaatgcaatggaggccacttgtaggagacgtctgggttggtcaacgacaaggctgaagcagacagatcactctgatgaacgcatctatttttcagaaaatatggtagtttggaacatgttggaatggagacaaatggaaaggacaaattttggaggtagaactgacagcagttgaagatggaaactcccgggtttgtttatttatttattcattcagttggtatattatgccctatcaaatgcccagcttatgctaagccatttgttaagatatggcaatggatcttaatatattaaacaaataattacacagacaattacactattaacttgtaataaatacaaagaaaattacagagttttgtgaggtttataacaggaatttctaaccactgttggtgtttagagacatcctcaataatgtagcaacgttcaaggacaaggaggttagaaaaatagtaaaagtatcttaattttggttctcctagaagtatattcagagataagtattcaagtgctagcagtgttttgggctttaccatggaaatgggacattacatggatgaagcagataaattatggctactggactttatggtatatgtgactattgagatgtcagccatgcctgcagccatgcagatgtcctggctcccaggaactgatctagagtagcattcctctccacttaatctgcatcatttccccatcaggaaaaacccagaaaatgactcccttctttatttgttacaaaggaaataagttcttattctattagacatttggactaggtctactattggtccctttacccctgtggaataggcttttcttgtccagtagcattgctttgggggattgcttcttcaatgttatgagtttacattcgtggggagagcagttgcccatgaagttccagcctagctttaggggaggagctgtgggactctaagggatagttccaggtttttccacaaaccggcatctctgagctctaggtgataacaacacctggggtgttggtggtgatgattctttttcaaaaatttatatgtatctcaggggaacactgaattatttttgtttttgttgttactatcagcattatcttcttcattattattttaaaacaaaacaattctttattattgaaataatatgtttctaatgactcttaaccaaaatgttatctgtgttttcaaatgtatacatatagtgtacattttcttatattttcctagattgcctttttgttggtttagtaaggctgggtaaaaatgtagcttgcatgagattctattgaaagtttacccttgaatgagaatgttttctcaaatttaagtttcctctgccagtcttcagaagctagtgggaaattccagtcctgtgagaaatgctgacattaatttctgtaaaatatctagaacaattgatattgcataagtcagacccaattcgttcttagaatcagaagcccatcagaacagaggaggaagcacacggcttgtattaaaagggagttaatggaatgtttcctcttttattctgggagtttccaaatagataaggtcatgagggcatcagggtctagattggaacagaaaggcaagacgtaaatttattcttctaactctttataaccgatgtatcccaaatttccaaactgagccttgagtagagaagcatatgagtcattgaccctgtctggccatatggctcttcaacagtggccttctctactccaccccactgtaccacaatttaaaaaatttatcttatgttgttgtaccactgagataatgatagagaataaacttaatcagccttgtttagagagtctaatttgtgaaaatttatgaaaagacgttatattggctaagactttatatacaaatacattccactcaaatcacaatttacctactgtacgtataatgataggtattctctgtctagttcaagttgattttcaaacagatgagctttaattttatggattttcttaactaactgccctgcttactctgtttccttgattctttgtgtaacataatgggtaacttgatctgtacctcctattttacaggcacataattcatctcaatttcagatgcaggagagttgttcctgtgtgacttctcagcgtcctctccacactctcaattagatgattatttaacaggcagttgaattcccagaccaaaccatcaaggcctagatctttaattgcttaaactgtttgtccttacatgtagctttccaacatcctgctgggtcaagtttaatttaaaaaagatggctttcctatcctgcaaacattttatagaatagaatataagcagtgagtcaatgatataacaaaatattttaatctatttttatctaaagtatgtatttattaaatctcgtatgtatgtatatataaactctatgaaactgggttctttctatggttaaacatgttgggggtttagtttcttccaatgcccaaatctacctttaatcattgcttaaactgatgaagagcaaaattgttattgttagagaattatttaacactttctggtgaaatacctgtaggctcaattttattatttttttatttgaaaaactttaactaaaatgcttttggcaaggtctgtggcttatggtccttaaatgaagaataaagcaagttatatcttgttatcagttctccactataaggtttatatactagcttacaatggctaagatggacagttctggggttccatccatgagggcactgtgaagctttggcactgggattcctaagaagctgccctagaacacctgattttcagcaaacagtaccaggagacttaaaacaaaaatctatatagtcatcactggtattcctgggtgctggttccaagaccccttgtggatattaaaatccatggatgctcaagtcctttacattaaatggtgcagaacttacatataacctatgcacatccttctgtacactttaaataaataatctctagatgacttataatacctaacacaatataaatgtaatgtaagtaatagctgtatcttattgtttaggaaataattggacaagaaaaacatcctgtaaatgttcaagacagacccaactgtccatttaaaaatatatatatttttgatctgtggttggttaagtcgacagatgtggaacccacagatatgaagagttgactataattgcatttctctgacttgcacagtccctcctttttatgctatgaaatataaaattccaaataaaatttaagtcccaggtacttttcaaatggcattttaaaaatatatctataaagaaaatagagttttcatttttttctataatgtttatgaggtctgccctattccttcctttttcttaaaaactttacaattcttcctttgtttattcttaataaaaagtctttgaagaattttaaaaactgattttaaaaaacagaaagtatgtaccataccaaatacataaaagggaagcaggttgaaactatttttatgttgacattgagaaataagacaaattacaaaaagtctctttacttgataaaataaaccaaaaaataataaaagccagcaaaataaaaactatcaaaaattataaaggaaatggaataaaacctaatgctatgaactttgaaaagaggaagctcagaaagggagaaaggaaaaatacagaaatgctgaaagacagacaaacagaccaacagaaaaaaaagggaggtggaaagagagagaaaaagagggaagagaggaaattctcttcaatttatgcaaagctttatttaagggattttattaaaatgatatttatagtatcccactttataatattttaatctatcgatccataagaagaaatgtttgaaataatgcaactttaacattcttgatgattaattctgggtgatggaattgcctgtgtaagtgtatgtctgtgtgggtgtgcttattgccttttattacttttcttttttgcttgaattgatcatgtacaatttttattaaaaataatgaccatgacaatattaaaataatctttttatatttaaaaatatgtatatgttttatattatatatttatattttcttatatttaacatatataaaaatatgttttatgttatatatattttgtatatacataaatatatttatatattcataaatatgtactatgtattatatatctatattttgaatatatatgcatttatagttgatattttaaatagtagtgttatttattggaaattgatctgtttttctttctttttttaatgctatgggggtcttgctctgttgcccaggctggccttgaactccttgacccaagcaatcctcccagctaggtcttccaaagtgctgagattataggtgagagccactgcaccctgttttttttttctatattccatactatttatctttttttgaagctatgatgaggttgcatatttgaacagtacctctcagatgtacaagaaaaagttttacaatttttttatttatataaatgttctaatgtttttcacaatccatattctcttctctggcaggattttgtttttcactacatcctcctgtttccctgtggctaaaagacttacaactataatttcatggtagataaaatgccatagagaaaccagcttgcaaataacgaaatgcacacaggtggtagttcagatatatgatgtgcattacatgtattttcttgatttgtcttttatttttaaattacatacagcatccttaattattccctttacctatttctcttttaagagcaagcatatttcactattattgcccaaatgtagggctgcaaattacaaatatgggtttactttataaaactataataaaagtagaaactgagattttattatacttgataggggattgttattttttatgataggaagagtacatatttaactgtaacccagttttttgggaagtgacaatatttaccctgggatatggtgcatcgcatgaaaatattacatgattagaaggctgtaataggtattcttatgaaggtgctggaagactcccagaaagaatttgggaaaagataaaataaaggaggagcttaaataatgtcaaaagagttagcctcttatgtggaagaacagccaaacaggcagaaatgaaaccatttcaaaggtacttgaactgaagtctcaaaaacataagaagggaaatttaatgctagtgcctactagacagacttcctttgcaaacttgaacaaatgttgcagtcttttaactttatttctttagtttctgaaatgagaaagattcaactttgttgcctccagagtccttgaagtgactaattgcctaatagtttctaaagacctttgaaatccaaagggctgagatttacatactatgccattttcctccttgatcattgcatttctgttaatttctctgtaattcagtttccacttcattctacattttttaacttactgattatgtttcttgagatgtgttttgctgagaaaggggttgaaatactcaccaaccagaacattagttaggacctctgatttcagacttattttctaaaacatgacattcccttctttttaaattttttctttcattttttcttcttcccttcttccatgaaatattccaaagataaagaaaaatgcataaaataatatataacttccagtacatgtagctgtgatacagatgccacaaatgataatgtttagttgaatttgctttagatatattttaaatataaataaaatgttctacacagaggaggctgcaaaacgagagcctccccaactccacttgcttttcttttccatgagttgaccactgtcttcaagatgtatatgttcctcccaatcaggttttaaaatcaacgtgatatcctggaaagttttaaatgtacatgaggtaaggatggaactgtacatcatcatcttcaacttgattgtttttaactcaacaatgtttcaaaatttaaccagtaattgtttttaactcaactatgtttcaaaatttaaccagcttgatgtaggtggtttgatgtggatccattcatttgatgtggataatgaatccacataattcgtttgatgtggatatatatagtgttccattagctgtaccttaatttatctttttttttttccattttgatgggcatttgtgttgttcagggaaatgcaaataaaaaccacaatgtgataccaccttattcctgcaagaatggccataatcaaaaaatgaaaaaccagtagatgttggcatggatgcagtgatcagggaacacttctacactgcttgtgggaatgtaaactagtacagccactatggaaaaccatgtggagattccttaaagaactaaaagtagaactaccatttgatccagcagtaccactactgggtatctacccagaggaaaagaagtcattattcaaaaaaggtacttgcacacacatgtttatagcagcacaattcagaattgcaaaatcatggaaccaaccgaaatgcccatcaaccaaagagtggataaagaaactgtgatatatatatatatgatggagtaccactcagccataaaaaggaatgaattaacggcatttgcaacgacctggatgagattggagactattattctaagttaagtaactcaggaatggaaaaccaaatgtcatgtgttctcgctgatatgtgggagctaagctatgaggattcaaaagcataagaatgataccatggactttggggacttggggggaagaatgggaggagggagagggataaaagactacaaataggatgcagtgtatactgctcgggtgatgggtgcaccaaaatctcactaatcaccactaaagaacttagtcatgtaatcaaataccacctgtaccccaaaaacctatggaaaaattaaaaatgaattaattttaaaaataaaataaaattaaggaggaataaaccaaggctctgagaaattcagtgacttgctaaagtctcacggctaggaatctttggagccatgtctgcaagacactaaagactgttctcttagattctacattcttttcttgtgatatccatgaatcaatattgaataagatactggagggtaccaggctggaagtaatccctcccccagaactcctctcacccccacaaaaaaccccaacaagattgtaataaacattcgttgttaacatgtataaatttctttagcataaacccttgcagggaagttttcaagtcacaggtaatcatgtatttcaattaaccttgatctttccatattgttttccagagtggccaccagctgatgatgagattcactgatcctcacatcctctccaattcttgagattatcatggcttaactgagagatattacatggtatcttatttttatgtgtgtattttgtgggatacactttgcatatttaaaattcacccatttgagtatatagttttatgaattctgaaaaatgcttacattttggcctaatctacagagcttcttatttgaccctttactttacatctctcaaacttatttatatatttttcatcccctcacctcacaatgctgtatttaggggatttttgagacaagtttgtattagatctttcattagctgttttttttttcttttccctattagtttagctttattttcaatgacctaacctttgtagggggaaaaaaatttacttcagtggaaagctatacattgtccagtttctagatgacgcccctgcaagttatttgatccagattctatggaagttactttacaacttcatgaattgtagatgatatcaacgcaaatgattctatgtactgacacaaattctgtcctatcctgcagaggttcagtttacttcccccctacagtgaaaaatctttccccagctcttctgcagttattacaaaattttctatctctaaatgtatctgttctttgcattcttttttgaaatggttataattacttgtttctctaatgaatcaaataaactctttggcatatatttatcttcatatctgtatgagagtcacggttttactttcttcggcacgttataacttagtggttttcactcttagaaattttgtttgtaatcccagcactttgggaggcggaggcgggtggatagcctgagctcaggagttcaagaccagcctgggtaacacgatgaaagcccatctctaccaaaatacaaaaaaatagcccggtatggcggcatgtgcctgtagtccaagctactcaggaggctgaggcaggagaataacttgaacccatgagaaggaggttgcagtgagctgagatcatgccattgcattccagcctgggtgacagagtaagaccctgtccaaaaaaaaaaaaaaaaagaaagaaagaaagaaaaaaaagaaattctgtttgttaagtttttgaacctgtttttttctccatattattgttttgtttttttgagacagagttttgctctgttgcccaaaatatttcatattgccttaatttttctttcatgcagtgctatttctcctgcttaatgcattcccctgccttttctcttgggaatatgattcctaatatgattcaggaattctcatacactattgcctttaggacaatttgcttttactgtgggtgaaatatttacctgctatgggttgtggatgggaggggtctcaataaaataatgttttatttgttttgctaatgcctgggtagtttaacttgtcctgagtgagttgcagtgtttgatttgacttggtgttcctatgtgtgagtacgatgctggccttgggtttccatttatcacagggtaacatcatgttcctaggttgtttgtatgttttcttgttgtttctctggcatataagtcaaggttcatataggctacaagaaaatgtttaatatattgaattaggttggagtaattgaagaaactgattgtagaaattatccctagattaacaaactcatactaccctggaaccagcatcagtgctacggtggaaccaagaattcacttctgcctccattgtcactgccaccagcatctgtctactcccaagaaactaaaggacaggcactggactgctactgcagaaacacccacaattccacaggcttgcttgcgtaagtggctgaaaatcacctcaactcttttctaccttctaatgttaggtgagtgcaagaattggtgaaaactgattctgcttcacatccctggctgcatggaagtctgaaaaatgtagttaattttatctttgttcttggtatgtttattttgtcttgattttctttcaaaaacctccaagtaggatgaaagtgtaatacaacttgagtaattcaattaagagtgaccacacctagactaacagcagacactcctttcaaggagtgggttctaactcacacttcacaggcaccaatgggcacttcattttggttttccagaaagcagatgataagatgaagttaggagtgcaaaagatttattgaggaataacatttttaaatgtaaaagggaggcaacagattgggagatggcgccatcagagttcaatgcaggtctaataaagtctctgctaagctaataacctaggacaatgatggctcacaaaacactcacattgtacagatatggtcagacctttgtactataggctgactcagtcataagttagggctacccctatgatgatataaagctgaggggaacctgatggagttaacactagaaggctatcagctaatgacatgccttgcagctaggcaatacactctttcttgaagggagatattgagagtgtgtctctgtgtgttgcagaggtcacttgtgctgtcagtaggtttgtgtgaaaaatgttgctgcacccactagggcctccctctgctctcatactcaaatacactgcctcaggatcatttgtatttacctcactaattatcctttcattctgggcacaggtaaatggtcttttctttctttcaagcttggctacattatccataatttctaagtattaacagtaggaggacaactgtatctagacatcagtttgcctttttctttcattcaatttatttacttctaaaagcatcacttcagagagattaacgagggtcagtgaacacatttgaagcaactgtgattacgccactgagacaatcagtaaaagatcctatactggtctcaaattaacttgaaaacaggtaaggatgccgtgatgagtggctaactattgccctgtttttagcagggtcaactgatagatacctaacttttaatgagaatgttaaggatccctatgctagaagatggagaaaaattaaaaaaatggaaaataaattgtccctgtattcaagagactctgagtctagttgaggatgggcacaaggaatagagtagaaataattccatgtgaaaatatgtggcttgaacatttcctatcaaagtgtcgattgtggactaccagcatcagccgcatcacaagctgataagaaatgcaaattctcacacccactctaaacctactgcgtcataatctgcacttgaataagatattcaggtaatccatatgcaccttaaagtttgagaagcactaacttacacaactgttgattgactttggagaaagaaacagactaggaagggagggacagaggaacctcaaatagttggcttgaaatctcagcttaaaggaaagagagaatttgaataaacagagttacaagctttttggaacaaaatatagtcatgtgattttaaaactttttggaaaaatctccaatattaacccaagaatccactgtgttattttccttagtaaggttttatggcacatctaattaaagacaatttgacttgatattgacatttatgttgtatgtcttctatgctgcaggattttgatgaaacacagaatttttctgataattcattaactaggattaaaatggtctgagtttataatgagtttcactattaactaatgtttgccattgcaaggtgctttacggcctaaagtgtggctttaataaattctattgcatgcattcctctagattatcaaaaagcagacattttgacaaaatgtgttcttcctacagcattttgtgaatgcattttccctctcgtcttccgtcttctgtgaattggaaactgtataagtccacaaagcagatccacatgttctgaaatggtagtaatggggactttggctataagttaaaatgttctctttaattcctgctcacattattaagacaggtaaattatattttcatgaaatgtttccatgtttgaaaacctctgctatatatatgatgtaatttcagggagtctctctgtagctgccattcttgtatttttaattccagaccacagagggaagtagcaagccttgaactgacactactaattcagtgtcttggtataacagggagaagcaaaacatttttaactatgactttgaggtaatttttaaaaattatctctaggaattcttattcttatagcttgagttagaagttataatagtgttactggagaaggagatatgaagaggaatctcatagttacaaaaagtgtagtctgagcttaatgcattaagaatgggaacatttgctaaattccagcttatttgtttaagtggtttccatttcccttccttatgccctcagtttcacaatttatgggcaagtttagatattcagtaatacttaaaaaaaagtaagcagtagtgctgtgatttgatgtgtcacctccaagattctggtattgagatggtattaagaggtgattaaactatgagggctcctcccacatgaatgggattaaggcctttatcaaagagatttttcttagtatttgcctctcttcttcaatctccttccatgtgaggacacagtcttcctcccctctagaggatgcatactttaccagacaaccaatcctgttggcatgttgatcttggacctcccaaccatctagaactgtgatgaaatagaactctcttccttataaattaccctatctcaagtatttggttatagcagcacaactggactaagacaagtagctcagccaacttaataaataaataaataggtttcattttattttaagaacttcattgagatatagttcacatttcacaaaattcacccatttaaaatatataattcagggatatttagtttagagttgtcccctggtgcctattggggactggttccaggaacccttgcaaataccaaaatcccaggatacttgagtttcttatgtgaaatggaatagtaattgcatataatttacacatatcctctcatataatttaaatcatctctcccttatttgtaatacctacttcaatgtaaatgctatgtaaagtagttgctataccctattttatttttcattattatattatttttattgttttattttcaactatttttgatatacagttggtcttatctgtgaatgtggaatccatacatatgaaaagccaactgtatttagtgtattggttatgcatctattaccgcagtcaattttagaacacttacatcaccacaaaaagaaaccctgtaccaattagcagtcaattacacattctctctctcccaatccctgacaaatactagtctactgtctgtctttgtggatttgcctactctagatgtttcatataaatagaatgacaaaatgtgtaaccttctgtgactacctttttacatttagcatcatttaaaggtgtaactattagtacttgattcctttttaattgtcaaacaatattccatccaatgactataacacagttgatccacttatcattttatggaaatttgaattgtttctactttgtggctattacgaataatgctgctataaatattggtgttaaattttttgtgtagtcatatgtttccacttctcttgtgtatatacctaggaatgctattgctggatcataggatacatctgattaatgttttctgaggaagtgccaaactgttttccaaagtgactgcagcattttacattcacagcagcaaagtatgaagattacaatttctccacatgcccttcaatagtattactgtctttagtttttgttatagccatcctaatgggtatgaaatggtatctcagtgatttaagtttgctttgtttttgttttgttttgttttgtttttcttgagatggagttttgttcttgttgcccaggctggggtgcaatggcgtgatctcagctcaccacaacctctgcctcacaagttcaagcgattctcttgcctcagcctccctagtagctgggattacagaaaggcgacaccatgcctggctaattttttatttttagtagagatagggtttctccgtgttggtcaggctggtctcaaactcccaacctcaggtgatctgcccaccttggcctcccaaagtgccgggattacaggtgtgacccaccatgcccggctgcattgttcttgatgactaacgatgttgagcatcttttcgtgttcttattggccatttgtatacatactttaaaaaatgtcttctgaaagtctttgtccatttttaaattgggtttttgctttggttgttgagttgtaaaggaccattatgtattctctctagtagacccttatgagatatttgatttgcaaattttctgtgagtagtctttttgctttttgatagtgttatttaaaacatcagagtttttaattttgaattccaattaacctatttttttctttggttcttgtgctttaggtgtcatacctaagaaaccattgcctaatccaaagtcagaaacatttgtattcattgtttcatttaagagttttaaagtgttatggggccaagcacagtggctcacgcctgtaatcccagcactttgggaggctgtggtgggacaattgcctgaagccaggagttcaagaccagccagggcaacatggcaagactctgcagtggcacaattatggctcactgtagccttgaaacccctggctcaggcagtccccccacctcagtctcccaagttctgggactaaagtcatgtgtcaccatggctggctaattaaaaaagtaaaaaaaaaaaattaaaaagagttttaaagtgtgagctcttacttttaaatctatgatccattttgggtttagttttctatgggatgtcagggagggattcaaattcatatttttttcaggtggatattcaattgttccaaaattatttattgaaaagactattattttctccactaaactgtcctcttgaacttattgaaaatcagtgaccataaatgtaaattatacttctggagtgtcacttctattctattgatctatacatatatgcttatgctacggccacattgtcttgattatcatagctttgtagttaagtttttaaattgggaagtgtgagtcttccaattttcttcctcttctaaaataatcttcttcatgattattttagctcttctgggacttttgcattcccttctgaattttaggatgagcttcttaaatctgcaaaaattttagctgggattttgataagattgcattgaaactttaggttaatttggggagaactgccatcttgacaatattaagccttccattccatgaacatggatgtctttctatttatttaaatcttctatctctttcaataataccttgtaggtttttaatacaaatatttaacttattttgtcaaatttatttctaagtggtatattctttttgatgatgttgtaaaaggaactgttttcttcattttgtttttatatgatttattgcttatttaaagaaatacacttgcaattttgtatgctttcatcctccaaccttgcttaagtgttgttttttttagttcttttaattttataggaaaattttaagttttctataggcaatactatgccatctgcagtggaaataaatttactcctttttccccttaatttgtttgacttttttgcatgcctaatgaaatacctaattattttcatgcctgattttcccagcatcaacatccagaacaatgttgaatagaagtgacaagagcagacatccttgtcttattcctgatattagtgtaaaacattcagtttttctgatattagatgtaaacatatggcctttcaccatgaagtgtaatgttagctgtgactgcccttttgcaggttcaggaagtttcctttaattcttaatttgttaagtgtttttatatatactggtcaaatattttcttctggatgtattaacatgatcctgtggtttttgtaccttattctataaacgatgtaacatatgattgatttttggatgttaaactaaccttgtattcctgagatgaattccacttgttgtggtatataattctgtctatatttgctggatacagtttgttagtgtttttaatgattatttttgcgtctatattgataaataatatttatcagtttttcttttttgttatatctttgtctcattttggagacacataaaatgtgtcaagaagtattctttttcttctactttctttggaaacatttggaaaacctggcatttcttctataaatgtttgttaaaattcaccagtgaagctatttcatcctgggcttttcttagtgtgaagttcatatctcacaaattcaatccttttaaccctttacatgtcaactccgatttggtattatttttttcttgagtaagttttagtagtttgtacccttctagtgatttgtccatttcatctaagtaatctaaaatcaatgtgttgtatttttattcatctctaagtattttctaatatctcttgtgaaattccccaaatttatttcaagtctattgcagaggtcaatctctgtatgatttcaatccttctaaattattaagaagtattttgtgtcataacgcatagcctatacttgaaaaataagtgtatcatgttgctgtgaagttttttatagacatttattagtttattttggtttgtaatgttgctcaagtgttctatatccttcttaattttctatctagttatttattcattcctgaaaggtaggtattgaaatcgctaactatgaatattgaattgtctgtttttcctttaaattccaccagtttatgcttaagatattttaggacactattgctatgtgtttatatgtttatagtttgtaaacttttctgatgaattgatacttcatcattataaaatgcctctctatgactcttggacaattttttgtaaaaacatatcttgttcgataatgatagccactcagttgttttggtgactctttatttagcatggctttttccattcttttattttcaacctatttgtgtctttgaatccaaagtgtgccttttgtagatagcatatgtttatattgtgttgttttaattcattatgtgaatgcttactctttaattggagcatttaacccatttatatttcatgtaatttctgataaagtagaatttctgccattttgccatttgttttcagtgtgtgactgcacatttttgttcctcttgatcttcattactgctcacctttgagtcaaatagatacactgtggttgccatattaattctcttgtttcatcaattttgatcatattttttggggttactatcttaattgttgccctatgggttgcatttaatgtctttacttaatatgattttgttagattaataccaacctaatttcaataatatacaaaaactttgcttctatagctttattctcttcccctcattgtactatcattataatacaaatcacttctttatatatcatacattcatcaacacagtttcctaattattgttttatgtatttgccttttaaatgtagataaagaaaggattactgtgtgtatatatatatatatagaaagagagagagagagtaatatatagatatgtgtgtgtatatatacacatatatcttgtcttacctgtctacctgtgtagttttctttactggattttttttttaactgtacatggatttgaattattgtagagcatcacttcatttaagcctaaagtattcactttagtatttcttgtataacaggtctattaggcacacattctctcagtttttgtttatctaagaatgcctttatttcttcattgtgtttagttttagaactttatatatacaaaaatattgagaagatagtgcagggagttctcatatattctacactcacttttctctgttattgacatcttacattagtatggtaccttttttacatttaatgtacccatattgatacattatttttatttaaagttcatgatttattcagattttcatagtttgtgcctaacaccctctattctttttcacccagaatattacgttgcatttactcaacatgtctccttagactactcataggtgtgaaaatttctcagattttcttgtttttgatgagttcaatagttttgagtaatactggtcaggtataatttgcagaatttacatctattgggatttgtttgatatttttctcataaatagatggcagttatggattttatgatgaaaactacagaagtaaactaccatttttataatataatattgagaatacatactgtcaacatgacatcagttttgatgactgccttgatcaccttactgagctagagtttgtcaggcttctccagtgtaaatccatttatcgttctttatcatactgtatgatttattttaaaaaatcactactcgcaacacatacttgaggagtggaaacttttactctatatccttaaaggaagtatatatatgtaaattatttggaattctttgcacaggagatttgtttattctcctccatttattaatttatacaaccatttatttatatcaggatagactcaatgatactttattttatacattgggttataatacatatgacggttaatactgagtgtcaacttgattggattgaagtatgcaaagtattgttcctgggtgtgtctgtgaagatgttaccaaagggattaatgtttgagtcagtggactgggagagggagactcaccctcaatctgggtaggcactatttaatcagctgcctgaggctagaataaagcaggcaaaatttgaaaagcagactccctgagtcttctggccttcatctttatcccatgctggatgctccctgccctcaaacatcagactccgagttcttcagcttttggactcttggacttacaccagtggtttgccagggtctctcaggcctttgtccacagactgatattcgtccacagccaatagccgcactgttggcttccctacttttgaggtttttggactccaactagcttacttgttttttagcttgcagacggctgttgtgggacttcaccttgttatcacgtgactcaattctcctaataaactcccctacatatatgcatatatcctattagttttctgtccctttagggaaccctgactaatataatacattactaatttatttattttgttacttacacttgttccagctttggccatttgaagctcttccaattggctttttttcactttgaaataattccaattattgtgaagttttttggtttttgtttttcatcacctccttacctattgtcactacaaatatcccaggctcatcttttatattttctgccccaatcctcaaatcagccagttttccaaagagtcttgataactttaattggagaataaaattagaaatcgagatctaagtgctaaatgtgctggtcgctactggggttttgttgcttctaggtgatctcagctgacaaagccaggaaatatatatgagtgtatgtatatatacccatgtatatacctatatctataaatacatatctatatgtaaccatcaaaatctgtaaatgtttctatatgtaactaccaaaatatatattaaactaagcatcagtttatactaaagtcttcatctgatgtcacccactctaacccattacacgtggaacagtctaactctctccccttgctgtaaacttttattccagttgtgagaaacctacctcctacttctccatccatttacttaattgatcaattctagtatatacatctagcagtgtcataatcaataatctgtaacccccatgaatacaatgttatcaatgatagtatagtgtcttgcaccttttgtttttgccttaagtttcacagactccacgtatttctagagttacttaggtcaacacctttttctcaattcttttaatgaagttgtttcatacacttgtaatacagttaaactgttttgttttgttacattctgcattctattctggaatttccccaaccacctaaatgattattttattgcatgctttaatattcactctatatgctataacattcagtgggttttgacaaatggataatgttctgtctgtatgagtacattataatatagaatattttcactgccctaaaatttcctttatgcttcatctattcaacttgcttccctcaaactcctggcaaccactcatctttttactgtctctacagttttgccttttccagagtgtcatagaatcccaatagtacagagtgttttgttttcacttaacaatacttatttaagcttaatctatgtcttcttgtggcttgacagttcatttcttttgatcaccaaatggtacttcattgtgtggttatactagagtttgtgttctgtttatccattcacctatttaagagcatcttggttgcttccaggtttggctatatgaatagaaattgtaaagacattctagtacaagtccatgtgtggacatacattttcagacagatgggtaaacagctagaaatgtgattgctagattgtaagataagataatatttgactttagaagagactgccgacctatcttccaaagtgagtgtgctgttgttattcccaccataaattaatgaaaattcctcttattctctgggatggcaattttgttggatatagaattcttagtagagacgctgcctttcagtatctgaatatgtcaacccactgcttcctgacctcagtggtttccaatgggaaatcagctgctaatcttattgaggatcccttgaagttgatgagtaacattttttgtattgcttttattaatttcattttgtttttgacaatttgactattgtgtatctagttgttaattgtcgaagagttcactctacttgaaatttattgagcttcctgcgttggttgcagttttataaaaaaaaaatttaggaacattttggccattaatacttcaaatagtctttctgctcatttctctcttttctgtccttctgctattcccactatacatatgttaatacgcttgatagtgtcccataagtctgtgaggctctattcattatttaaaatgcttttttctatttattcaccagtctgtattatctcaatcaacctatgtttaattttaatgatacttacttcttccagctaaaatatgctgttgaggctatctagtgattttttcttatagtaaaattcaacatacaactgtgtaaaatgacttcctgttatgcagctaaaatgaacaaacataaactaaaggcttaatgtatgattggtggaaaagtactaaactgaagtcagggatcataaacttaaagaaaattagaagctcagtattccaagggacctcatacactgtagggttccgtcattccaaagtttgatttccatacaatattacatttgaatagctgtttctattctatttcaatacaggtcaatcaccaaaggtatgactcagggcaggtgtccctaagtttccattcctgtaaaataaggaagtaatattttgttaactatagtcttttttgaagttttaatattttataataccatttgataattcaaaatgctatttgggaaaacagcacttttgaataaagtaaaaatggtgttgttgccataatagcatattttgaaaatattttctgattaacttaggttgaaaatcttacctgaacattattttaatatgttcaggtaatattatgattattttaatacatcttcttattagcccagtaatgcttgttagatgaatgccaatagtgtgcttaccagcattgctttatttggactggatttacaggatctctttgaatgcagagattgggagataacatcatcatcatccttctcatcatcatcaacgttattttataactggataatgtctaatatttccatagtacataataatttattaaaatttaccttgggttttcatttaccagaaaaaggtgacttgtcaaagaaaaatgatagatttttggtagataaatttttttctcaatatttggaaaaatattgtttcaagtatttaccttatattaaggggctatttcctttgtgtgtatgtgtgtatattgtttatgtaagtgtgttttaatatacatgtgtgcacaccatcactggtaattatcctgttactgagtttattgagtttaataaacccagaatttttttccccaaggctactactgtactctcttttgggttctctggtgctttaaaggctgctgtgcttgtctggggactttcagttgtcttcttatattcacttgtcatcaaaagaattttgggaaatggcatgatgtgtgggctgatccataaagcttggtcacttatgccaaagaattgatgtttatgcaaaataatgaagctttatgttggccttaccagcttattcctcttagtttcctggctgtttgcatcacctatcatagctgtttggtgatacgtgtatgcaatggcttagttttagaacatcattagaaaaagggtttgtatgaaagccagtaaaagaaaggaaataaagaaattgtttaagagaaagttaagcaaaaacaggagtgaactacttaagaaaagctatattgtctttaaaaatgttcttagctagttaaatgtcataagagaggggtaaaatatacttttacaaataacagttttttaagaaagtaattgttttctctgaatttcagttagagacatttaactttattaaagtagttttaatcataaaaaaatcaaaacgtaatcctttcatttcttttaattgatcaaagatgtatggatttttgaataagtttatatattgttatagcagggttttttatgcgttttatataatgaacttttcagtaactatctttgctgtcgtatttcttattcaacattcattctctcaagtgcatctgcattgtctaatactgaatcatgcaaataagtaaactgtatcaaataagagacacgtaaaagggaagaagtatgaccaaagcataatgagttttaaattatcctcctcactctcctccctgatgttattcttgtagctccacagtccctctcatttacttacattgatttaaacttgttatttttgtttggaaaaattctcgtgtctttttcatatgcgtttgtctgtattcttcaattaacctggaaactattccaggggacttggttctcccaacggttgagagaaccagcactttgttgagttgtggctgcttctgtgtggtgtgatgactggcagacagagtgtccattgttgtttttaactaggacgatgaattgtggaagttaatattctatgtatgacatcctcctgtgtaccctatctccagctctcctatctctgaaactggtagaaagagcaacagatgaatccacactgttattccccttagactgataatggaaccacacaagagatactatacagttttattgtgggcaagaaggttttaggctaagaaaaacaggagaaaaaaactgatgttagtttgagaacgaaggttgagatttttgtaccagtctaagtgtagtatttctgccaaaatttttcaaccatttaacatgtggatggatctttacacaaaatcaaatcatgatggaaatgtgctgcatgtttattactatctcaactccctcattattaaggcagtataaaaatgactcttatttcacaagtgtctatagaaagcttgtggctaaaatgtaagtagactgaaaatgggaatatatcttaaagacaattcagagtcagttgaagctatactgcatgaaaaactgttaactctcctgttttcataaatgccaagtgcagcatattttaaattttaatttgtgtttgtattcttggtaatttttatcccccttcagccaagtcctcatttatttgttcgctcacatctgtcctagaacattcatattttacagcaagaaaaatgcctggttgaccaaagctactaatccaagaaggagagttccagcaagaagcgtttctagaatgagttagaaacatacaaaatgagcaaaattcagactggctgagtaatgttttggctattaatgctggaagcaatgctcacaaccaatttacagctttgcaaagtttgggttttagagcaatccctgtctccttatccattagcaaggccgtgaggttcgtaactgggtgatccttgtcaggattagaagcaagactctatgtgctgacagcttccaacaatacaacataaaaaatgcaactgttgatattttaatttgcttctctctaatttttaacagctactaactgcctgattagtcaagggacatactaaaaagaagtatacaggggcagggactgttgtgataggctatttctcaagttaatagcataacaacatttttgaaagagggcaaatagaggtattccaaaatagcatggagagaagtaatttcattattaactttatttttattgggtaaaatatacataaattaacaatttttaagtgacaaactaagcagcattaattacattcacaatgttttaccacccttaccatcatctccggaattcttttcttctttccaactgcaactctgtactcattgaacaacaacttcctattctcccctgcccccagccaccggcaaaattattctactttctgtctctgtgaatttgattactttaggaacctcatattggtggaatcacagtgtttgtccttttgtatctggctcatttcacttagcacaatgtcttcaagtttcctccattttcatccaagtttcagcatgcatcagttttcttcctttttaaagctgaataatgttccattgtgtatataaactacattttatttatctattcattcgtctatgcacttttgtattccttctaccttttggttattgtgaataatgctacataaacttcatttttaaaaaacggtctgtgcacccaatgagctactattttatcacagtattttgcggtggatttcaggatagcaaattcctttgaagaactgagacccagatacattttacttaaatcatagaaaatatatatatatatgttttggtcataaaatattcctgggagcctttaaatcaagcagaatgcccagttttccagatggctatcttatgtttttttcttcatcatctttttaaaaaatattttttaaaatagactattccatgtgggtgttacttctggttttagagagcacaattctgttgtccattcttctgtagtctgtgatgaataaaacagagattcccatggtattttcagtaagataaaaccaagacttaattggacatggttcattcatgtgcagtatttctggatctactaactgtgtctgtttacaagggaaaggtggctgccttatctttcagaatggagtgatatatgcaccaatcgcctgtgatatttatagggggagggctctgttccatggatttggggttttatgagatgccccttggtgggatgccttttaattgcttgagttatattagccttgaggtaagatccttttctgaagtgtccagccaagcccccagctcagccctcctcaaagccacagtaaaattgccatgcttaagtagggtaggaatgctaacatcctagatctgagagaggtaatttggtccaaaatgcactccagtaatgtttatgtttcagataaagtgcttacaacactgccactgcccttttgacccccatttccttgttcatgtgcttctaggagaaagtgatacttaaattcaaatctttacttttattagctcccagagtgaactaggatttcagtccaatcttatctctggtataaacatcctgttacctttcgtatcttggagatatcttgaaaaaaatgattaaatacattccatcaagtgaacaaatagaaactcatcagaatctttctttcttttcttttctttctttttcttcctttcttcctttctttctctttctttctttcttttctgtgtgttttttctttcttttcttcttttccttccttctttctctttctttttttctgttcctccctccttccttcttttcctcctccatttccccttccccacctacgttttctctatttctattttctccctttcttcttcctccccaccctatctccttctctccctgcctttcccacttcctgggtccccctcttcatcccttttcatcttccctccctttctccttccatccctcttttctttctttcttttttccttcttcctttctccttcccttcttccttcctctctcctttcttttcttccttcttccctcccttcctctttccttcctgttttttcttctttcttttcaaatatatgaatatatatattgcaaactcaaggcaaatcattttcacaatctgtagtataatgggagcacactctttcttctaaagataatttctacttttatagaattgtaaacaaaagatattgcctccataatttctaatattctgcactaggtaaaagtgttctctttggatcaattaatggttgatctttttaaatatcttacaaatattcaaaatatgattattttctccaatattctccactttctgtattctcaattatttcactgtggaactaaattgcctcttgaagcttccagagattttttttgctctttgacagcttcagcagcttttgttcatgaaatttttaattcttgaagtgttctctttctttaccttaacatggataatacctgctactctttctagccattgtagaaaacatggcctgtacaaattcaaatgctattttctctggaaaggattccctaatctccctcaagactccactaagtttagtgttggacttctcccctcatacttgcccttccttccctgaacatggtacttgcatatttacttgactttttgtcgttagactacagaccactttgagttaggggttgtgtattgttccttggtgtatcgcccatgcctagcagggtgcctggcttctgagaggtcgcaaataaatgtgtgtctaataactaaggaagaagagaaactgtacgcatcaagaaggagatctgagattaccatcataatggagagctaccaaacttctccattcctaatattatgctgtcttacaaatataacctctaatcctcaaagtccctgaaagagaaatggttctgtaatacaaatgggaaaactgaggcttgaggagacaaatcaatactgataaaaagcacacattgactaaaagtggcaaattgagaataatatgaacatcacaaatagtaatagttgttcatttgtggaccattatcactgaaaatggtggaaaaacaccaaaaggtcaagcaaaactgtcacagccaactttgatagatctctggaaaatggtcaaaagtttgcaacaaccaagcaaacactgaaaagaggaaaaggtaattcaaaaatagtaggaacattttccagtgcttttacttgttcttgctctacacccctccttgatttggtggcaaatttgataatagtggcccatgttgccagtttgggaccctggtccttggttctggaggaagaatagcagatcttactctcaaagaattgtatttgacctgtctgttgcctgcctaaagactcatgcaagatgcttgactttgtttcacctaacttgaaattctcttagagcaaaaaagcagctacacagagggaatcattcaaaaagatagtaaagcaatgataaataacatgtagttgcttggagcaaaataataaaatcaaggaaaacaattgatatactgaaatcctaggaagaaagcttggagtttctttgggaaaatgaggcatttaaaagcactatgttcactgcagaattcaggaagacatatagatgccagggcaggttgcatgcctcagaagagaactgagaaaatcctaaactttcatctctggctgatctttaggctcagcgtaagcaggaagtaaggtctaaagttataagtggcctagataagtattgcaggagtgcccatttcaccataaaaacacttaacaaagtagaaatagcaggaaacttcctcaatctgctaaagagcatttatgaaaaactcaaggctaacatcatccacaatggtaaaaaacagaaaatgttccccctaatactaggaacaagacaaatatgcccaatttcaccacttctgtgcaatattgtgcctgaagttctgatcaatgaaacaagaaaaaaataaaagatatccaaattggacaggaagaatcaaaacgatcctaattcacagatgccatactcttatatgcagaaaaagcttacagaatccattaaggttctagcagagctaataaacatttcaacaaagttgcaagactcaaaaggagcacacacaaatttgctgaaatctctatagactagcgatgaacgattcaaaaaggaaattaagaaagaaattccatttatgagaacattcaaaataataaaatacctaggaataaatttaagcaagaaagtgaaagacctgtacactgaaaattaaaaatgtttctgaacaagttatggaaaacgtaagtaaatgtaagatcattctgagttaatggatttactttatgaacaactgatttttgccaagggttctaagaccaccgaatcggggaagaatagtctcttcaaaaattggtgctgggacaactagatcttcacatgcaaaagaattaaggtggacacttacttcacaacataaacacaaattaactgaaaaaagatgaaagacctaaatgtaagaggtaaagcataaaattcttataagaaaacatagtattataccctcaataataaagagaaaataactcaatttaaaaaatataaaaataatttgaatagatattccttcaaggtagatatatgtatgtctaatgagcacacaaaatgaagtttaatatcagtcatcaggaaagtgctaatccaaaccacgatgaaacatcaactaatgcccactaacatagccacaataaaaaaaaaaacacagaaaatagcaagtgttggcaaggatgtagagaaaaaagagccctcatacattgctagtggaaatgtgaaatgctttagccactgtataaaggtttggcagtttctcaaaaaaataaatatgaaattaccatttgacccagtaattccactcctttgtatatactcaaaagtattgaaaataggtattcaaacaaagacttgtacaggaatgttcatagcagtactattcacaatagccaaaaggtagaaattacacacatatccatccataaatgaatggataaataaaaaagtcatatatatacatagaatggccattattcagccataaaaagaaaagaggtactgatatgtggacccaagggtgaatctcaaaaacgttaagctaaagaaaccaaacacaaatggtcactactccattattccactcatatgaaatccccacaatagataaagtaatagagacacaaagaagattggtagttgccaggaaattaatgggggaagaacatacaagtggctgcttagtgcatatgggcttttctttttgggtcatgaaaatgatttggaacttgatataggtgggttgaacaacattgtgaatgtactaagtatcgctaaattgaaatgtctaattgtgttatgtgaatttcacctcattaaaaaaagatatgtaaaagaatgatagaaaaagattataattcactgaattaaaaaaatctgaatccatagtgatattcattaaaatgtagagagagggagggagggaaggaagcatggaaggaaggaaggaagcaagcaaggaaggaaggagggagggagggagggaggaagaagggaaaggaaaggaagggaagggaaggggagaaggggagaaggggagaagggggaaaggaaagaaaagaaggaaaggaatgaaaggaagggaaagagggagggagggagggaggaagaagagtattttcatggtttttaagtgtcactccacagattactttttaatacaaatggggaaatctacctttacagtaaagatatctggcagacaacatctcaacccagtagttttacttagcattgccaactatggagcaaattgacatcacaggccccctagtagggtgcaaaagaaagaaggcaatatctgctatgtgatactgttgccacagatgcttacaatgaatcatatcacatggaaataatcagatgattcagatgtggaacacatcatatgatagtctagactcttcaaaatgtcaatattatgaaagatgaaataatatgaaggaatattctaggttaaataagaataaagagaacttgacaacaaaatgtaatgtgtaagccttgattaaatctggaatcaaggggaaaacaaacaatcctagctgttaaaatcatatttggaacaattggggaaatttgatcatgagctgtacagtatgtatataatggtgtcatttattcattgcctctcagcttctaataaacccttcaatatacactctgtgataaacagtgaaatttctttaaacatttcccctttaaaaagtgagcatgatgctaagctttctaagtagagggtactggagagactttgcaggagcaagagactcctgcaatttccatgccaaagggtggccactggcggggagagattagtgttggtgccacggagcctaccccagcgtaagacccgaaacataatctctctgccaccaacctctgcctggcaatggcctttctacaaacttcttaacatggaaatcaatatccctgcatggcttacataaagctgcctataacacaaagggttacatgcagaacactacttgttctacgagtttctatgtggtctgcatacagcctacctatgccctaggtattccggcagagctgccactccctccgaagagatctgcatactctgaggtcttccctacctattgtcacctggactcctgctgccactggttactcattgccagcttttgcagctacaatccagagggttgtctatttgctcagaatctcaagaatagctccagactggcgaaactatttaacttcttggctatctggtggctaacccacctgtgctatgaggtctgaactccttttcaagtttgttctgctcttggcactctctctcagtcctgggttactatgtagacttctcttgtattttatagttagtcctttactatagttaataattttacagtttaacttaccctttttaacatactttctggtatatatctcctgactatccagattgctgcagaattgctatcaggcatagttccagaaaatataccccctaaagatgacatattagtttcctgggcttccgtgacagttaccccaaactgggtggcttaaagcagcagaaattcatggatctcacagttctgaggctagaagttaaaaatcagtatcactgagccatagttaagctgtgggcagggcctcactccatctggaggatccaggggaaagtctgttcctgtccattccaccttctgagggcttctggcattccttggctaatggctacttcactccaaccttgaaatctgcttgtatctttatatgaccttatcctctgtatgtatcaaatctctcctgcctctcccctagggataagtgtcattgtatttaaggcccacccgaataattcaggatattctctccatctcaaaatccttaatttaatctcatttgcactcctcagcttcttttttaccacacgaggtaaaagtcacaggtttcagagattaggatgtgagacatgtgagacgtgtgagacgtgtggtcttttagggggaatttttttcagcctacctcagatggggtgtgaggactggtttggttatgcccttgggtctgagcatgatctttaccagtgagatatgggacactaataaccaatggcatgaaatgacattacaattaatcaagccatcctctgcagctgattataattaagtgccaattgaaacacataccttgggagttcaagtgggtgctatccttaactgtatggcagtaataatgactataaaggctgcagtgtgaaatagttgtttgtttgtttgtttgtttttgtttagtgcacttgagtgcttacaaagagaaaatgacaagctaaggtctattatcttccatttcacgtcacggtccgaaaaatcagacagctttcacaatagccctccatgacatccctatgacaatgttttttttttctagtataataggtgcagggccaatatcgctgaaaatcagacacaaattttaattgtgagagttgttaaattacaatgacaattgtattaaaagtgtgttatgacaattcatagtatctccaagtttcttatgttaaaggctattgattgaaaagtagtgagattctaaaatttgtcatgaagacatctggttgaacccagataaaactgataatcttgaaccctcaactcattctgagcatctcttaccaacagaaatggctggccatctggtactccaggagtctgccttcctcagcctgaaaaccctttgatacagtaagttgggttggatgccttggaaagtaatgcttattcttcttgggatccatcacaaacccccacctccattgtcactaggcccatagctagtgtcaaatctcagtgggctctggggtggcagacaacataacccatggtgaaatagcaagaccttgctaatatatattggcagaaaccatgggaatgtgtgagaatattgtttaaggatattagaccaaaaaggaagcaatataacactagattttgctgtattaattgacataaattaatgaacagcctcagtcaggggtggttcttggcaaagataaaggaaaatctccccagtggcagaccttcatgaagtatatttgttgtccattatatctggagtgagaactggccggagtgtagatctatactaatttatgagcacttgctaattaatggtttagctgaagggttagggactttcaaagaagtaaacttagaagacttgtaacaaatgtgtttggggaagaagtatgtggattgacctctcagaatggacacagactgtgaagatatttttgtcccatgtggatgctcaggaaaaggcatccactgtagttaatagtaatgtattgtatacttaaaatttgagtagatcttacatgttctcaatatttaaaaaactactatgtgaaggtgaggagtatgttaattagcttggttgtgataatcacttcacaatgtatatatatgtcaaaacatcacattttaaaccttaagtacatagacctttgtcaataactcaataaatctggggaaaaataagtaaacaaagtaatatctctgtgtatgttagcaattctctttccccagccaccccagtgcttgcccaatggactgatgaacatggtgaccataataacagggttgtaggctatgtctgggctcaacaggaacttcttactaaggttgacctggctaccactaatgtgtagcctgatctaccattttttttgcttttaattctccaaaatttcttttctagtatgtgtataaagttatggcatgcatcacatcactcaaataatatacattacactcattaagtgatttatcatcacttccctcacttccactctttcacctgtccgagtttcctttgtctgttattccacattctacatccatgcatacacattattcagctcccacttataaagtgagaatatacagtatttgtcttgctatgtctcacttgtttcactaaagctaatgtcctccagttccattaaagttgcttcaaaagacaaaaatttttttttgtttttttactgctaaatggtgtcacattacggacatgtgccacattttctttatccagttatccactgatggacacttaggttgattccatatctttgctattgtgaatagttcttccacaaacatataggtgcggttatctttttgatataatgatttattttcttttgagtggttaccagatagtggaattgctggattgaatagtagttctatttttagttctctgagaaatctccatactgttttatgttcccactaacagtgtataagagttctctttcctccacattctaccaacatttgttattttttgtctttttaataataaccattctgactggccttagatcatatctcattgtggttttaatttgcatttctttgatgattagtgatattgagcatttttttatacacctgttggccatcagatgtcttcttttgaaaaatgactattaatattctttgcgtatttttaatggattattagtttttgttgttgagttgttgagtcccttgtaaattatggatattagtccttgttggataaatggttttcaaatatttgttcccattccgagggttgcctgtttgtattcctttttctatgcagaagctttttagtttaattaagtcccatttgtctatctgccaattttggatatcaacagtttccattgtggcaccattccctggggaccaccctgccacctagcggcaggttgattgaattggctctcttccatcacggaagtgacagatttatcctcattggaatagacatatgatccggatatgagtttatcttccctgctggtaatatttcttttagtactaccataaatggactcaaataatgcctgacccaccgtgatgggattcctcacagtactgcgttggatccagaagtgcatttcacagcaaaggaaatgcaataatgggatcatgtcttagaatcaaatggccttcccatatacctcattacccaagagcagttggcctaattgaaaggtaacatggcttaataaagactctgttatggtgtcaattggtaaattacagcttgaatgcgcaggattttgttttatagggtgcagtttatgctttgaatcagaggtcactgtatgtcattgtttttcctacagtcagagtgcgtgtgtcctggaatcaaggtgtgaaagtgaaaatgtctactctattatctaataaccccctgcaaaattttgcctcttattctgataatgttgagctctgctggattggagatcttagcctacaagaggaatgcttcccctgggggacatgataggtccatagcaatgacttcatcaaattgaaagatgaagttttgatctggtcactttgggctccctccaccactaaacaaataagcaaactaacaaaaaaaggagctaaaagggagctaatctactggctggaatgattgattttgattacccagagtaatctgggttgctgctgtaaaagaaaaagaaagacaatgtctggaaactatttttatgtaaacagaaaaaaaaaaaagctttcataagaaccaaaaaatcacatgaacactcatagaacctggttgtaacttcatatcactgaaaaaggcacggaagagatagaaaaaaaccagtcctgaattgccaatgccaagcttccccaaacctccatagtggctatgtggtacagagagcatctctggttgctgggggcaggggagcacagcaattgtgattcattgaactcagtgttgtccttttagagaagaaaggaaaactggaccaaactcagctgatgcctgcccacagaaaaagcatttaaaccagccctacccagaaaagaattgcaaatctcaactatcctaacttgaatttccccaaacctctccaccaagggctacagtgctctccgtctcaaagtaaacttgaaaggcagtctaggccataaggactgcaattcttttttttttttttttttttttttttgagatggattctcactgtcgcccaggctggagtgcagtggtgcaatcttggctcactgcaacctctgcctccaatgttcaagcgattctcctgcctcagcctcctgagtagctgggactacaggcgtgtgccatcatgcccagctaatttttgtatttttagtagagatggggtttcaccttgttggccaggatggtctcgatctcttgacctcatgttccgcctgcctcggcctcccaaagtgctgggattacaggcgtgagccactgtgcccggccagggctacaactcttagatgtgtcctagtgctgaaccaggcccagagacagtggactgggaaggaggggtacacaatatactcagacaccagctagggcagccaagggagtgctggcatcacatcttccctagccccaggctgcacagcttgaggctccaaaagagacacctgaggaaagaaaaaggaaacgtggggaggactttatcttgcatcttaggtaccacgtttgccacagcaggatagggcaccggtcagagtggtgaggtccctatttcaggccctagctcccagatattacttctagacagacccttagccagaaagaaacctgctgccttgaaaggactcagtcttagcagcatacatcacctgctaactgaagagcccttgtgtccagaataaccagaagcaatacccagatactacagcaagggccttgggtgagcttctgaggcttgccagatttaggtgagactaagcacattactagctgaagtggctatgggcaaaactccttctgcttgagaaaatcagaggaagaagtaaaggggactttgtcatgcaccttaggtaccaggatggcaacagaaagtagaccatcaagtgggctcttggggtccctgattcaaggacttgactcttagatgacatttctgaacctgccctgggccagaggggagctcactgccctgaaaggaaagtcccaggctatacagcattcaccaaaactgacttagcttttgggccttaagggaatatcagaggtagtctgggagcactcccatggcctgtggtggtggtggtggctaagggataagtcttctctgcctttggaaatgggtgtgggagggactgcatgttgtgctttgactgccaagtcagcctcgataccagagaattccaggtagatttctaaagattttgactctagtctctgactcccagacagaacctctggatagcaccttaggacccctcaggggcttgagggaccgcatcaccttgaagggaaggacacaggcctggctggctttgccaaatgatgattgtagagccccaggacctagatcaaacataggcagtagccagggagttgttacaacaggacttgggtgaaacccagtgctgtggtgacttcaggcctgacccaacacagtcatagttttggtggccacagtggggcttctgtcattttacccctagctttagtggctcagaacagagagactctatttgggagaacataagggaatagaacaagagtctttgcctgggaattcagagaattcgcccagagcttgttgaggaccatcaaggtgtttcctccatgagtcttcaagaactacagtgtttctggacttagggtacctgctaacatcacaacacctgagtccttcaaaatgtctttaaaaccttcccaagaaggacaggtacaaataagcccacagggtgaatatgacaataagtacctaattcttcaatgcccagacactgaagaacatctattagcatcaacatcatccaggaaaacatgacctcaccaaatgaactaaataaggcaccagggaccagtctgagatgaaaggtcacatatctgagagacagagatatgtgacctttcagactgagaattcaaaatagctgagttgatgaaactaaaaaaaaatttaagataacacagagaagaaattcagaattctatcagataaatttatcaaagagattgaaataattaaaaagaatcaagcagaaattctggagctgaaaaatacaattggtatactgaagaatgcatctgagtcctttaatagcagaattggctaagcagaagaattagtgagcttgaagacaggccagtggaaaatatagtcagaagcaacaaaataaaaaaagaattaaaaaaatgaagcatgtctacaggatacagaagatagcctcaaaatctaaagaggagacagaaaaagagacagaggtagaaaatttattcaaaaggattataacaaaaaacttcccaaaccaagagaaagatgtcaatatccaagtacaagaaggttataaaaaaggaagcagatttaaccaaagaagactacctcaagacatgtaataatcaaactctcacaggccatggacaaagaaaggatcctataagcagtaagagaataaacaaataacatacaatggaactccaatacatctggcagcagacttttcagtggaatccttacaggccaggaaagagtggcatgaaaacaagcaaacaacaaacaaaaagccttttaccctagaatactttatctggcaaaaatatcattcaaacatgaagaagaaataaagactctcccagacaaacaaaagctgaggaatttaattaatatcagacctgtcctgcaagaaatggtaaaggaagtaccacatccgaaagaaaaggacatttatgagcaataagtaatcaactgaagattcaaaagctcactggtaacagtaagtacacagaaaaacacagaatattataacactgtaactactcttacactaagtaggaagactaaacaatttatcaaccaagaataactgtgacaacatttcaaggcataatataataagatataaatagaaacaacaagatattaaaaaggagggctatgaagttcaggcatagagcctttattagttttcttcttgcttgtttgcttgttcatgcaatcagtgttaacttgttatcaggttaaaataatgagtttataagatcatatgtggaagtctcctgataacctcacaccaaaaaacatacaatgggcaaataaaaaataaaaagccagaaactaaattgtattatccgagaaaatcaccttcattaaaggaagacaggaagaaaagaaagaaggaagaagatcacagaacaagcagaaaacaagtaacaaatggcaagagtaaatccttatttgtcaataatagcattgaatggaaatgtactaaactagccaatcaaaagacagagagtggctgatggatgaaaaagcaagagccatggatttgctgcatgaaagaaacacacttcatccataaagacacacacagattgaaaataaagggatggagaaggatattccatgccaacagaaacaaaaaaagagcaggagtcgctatacttagacaaaagagatttcaaggaaaaaaactacaagaagagacaaaagttactatataatgataaaggggtcaatttagcaagaagatataacaattaaaatatatatgcagccaaggccctggaacacccagatataaaaaggacatattactagagctaaagagagggataggcctcaatacaataatagctggagactaactcccaactttcagcattggacagattttccaggcagaaacattggatttaatctgcactataggccaaatggacctaaaaggtatttacagaacatttcacacaatggttgcagaaaacgcattcttttcctcagaacatgggtcattcttaaggatagaccacatgttaggtcacaaaacaagtcttaaaacatttgaaaaactgaaatgatgtcaagcatcttctctgacacaatggaataaaactagaaataaataataagaggaatttcagaaactatacaaatacatgggaattaaacaatatgttcctgaatgaccagtgggtcaatgaagaaattaagaagaaaattgaaaaatttcctgaaacaaatgataatggaaaagcactataccgaaatatgtgggatacatcaaaaacagtactaagaggaaaatttaaagctataagtgcctataccaaaaaagaggaagaatttcaaataaacaatttaatgatgcatcttaaagaactagaagagcaagagtaaactgaaccccaaattagtagaagaaaataaataataaagatcagatcagaagtaaatgaacagaagatacaaataaataaattcagaaatgaagaaggaggcattacaactgatactgcagaaactcaaagaatcattagtggctactatgagtaactatatgccaataaatttgaaaatctagaagaaatggacaaattcctagacacatgcaacataccaaaattgaaccaggaagaaatccaaaacctggacagaccaataaaagtaacaagatcaaagccataacaaaaagtcccccagtaaagaaaagcccaagacccaaggacttcactgctgaattctaccaaacacttaaagaagaattaatacaagcctactgaaattattctgaaaaataggaggaaatgcttccaaactcattctacgaggccagtttaccctgatagcaaaaccagacaaagacacatctaaattaaaaactacagtccaatatctctgacgaatattggtgcaaaaatcctcaacaaaaaactagcaaactgaattcaacaatacattagaaaaatcattcatcatgaccaagtcgaatttatccctgggatgcaaggatggtacaacatgtgcaaatcaattaacatgatacattatatcagcagaacgaaagataaaaaccatatgatcatttcaattgatgctgaaaaagcatgtgacacaactcaacatcccttcatgataaaaaaaaaaaaccctaaaaaaaccagggattgaaggaacatacctcaacataataaaaggcgtttatgacagacccacagctagtatcatactgaatggggaaaaacagaaagcctttcctctaagatctggaacaggacaagaattctcagtgtcaccactgtttttcaacatcgtattgtaagtcctagctacagcaacaagacaaaagatataaagggcatgtgaactggacaggaagaagtcaagttatcctttttttgcaaatgatataatcttaaatttggaaaaatctaaagacacgacaagaaaactattagaactaataaacaaacttaataaagttgcaggatacaaaatcaacatacaaaaaatcagtagcatttctatatgccaacagtgaacaatgtgaaaaaagaatgaaaaagcaattccatctacaagagcaacacgtaatattaaatacccagaaattaaccaaagaagtaaaagatgtctatgatgaaaactataaagcattgatgaaagaattgaataggatgccaaaaatatgaaaaaaaaatttcatgttcgtggattgaaagaatcaatcttgttaaaatgtccataccacccaaagcaatctacagattcaatgcaatccctgtcaaggtaccaatgacattcttcacagaatagaaaaaacaatcctaaaatacatatggaaccacaaaaggcccagaataaccaaaactattctaagaaaaaagaacaaaactgaaggaattacagttcctgacttcaaattttactaccgagcaatagtaaccaaagcagtatggtactagcataaaaacaaaaacatagaccaatggaacagaatagagaacccagaaagaaatccacacacctacaatgaactcatttttgacaaaggtaccaagaacatacactggaggaaagatagtcttgtcaataaatggtgctgggaaaactggatatccacatcataagaatgaaactagacccctatttctcaccatatacaaaaataaaatcaaaatgcattaaaggcttaaatctaagaccttgaactatgaaactactacaataatacattggggaagatcttcaggacattggtctgggcaaaaatttcttgagcaatactctacaagcacaggcaagtaaaggaaaaatggatgaatgggattatcaaagttaaaaagttttctctcagcaaaggatacaatcaacaaggggaagataaaatccatacaatgggagaaaatatttgtaaactactcatctgagaagagattaataaccagaatatataaggagctcaaacaactctatagaaaaaattcagtaatctgatcgaaaataggcaaaagatttgaatagacattctcaaaagaagacataaaaatggtaaacaggcatatgatcagagaaatgcaaatcaaaactacaatgagatatcatctcaccccaattcaaatggcttatatccaaaacacaggcaataacaaatgctgttgagtatgcagagaaaagggaacacctttggccgggtgcggtggctcacgcctgtaatcccagcatcccagcactttgggaggctgaggcaggagaatcacttgaacccaggagtaggaggttgcagtgagccaagatcgcgccgctgcactccagcctggtgacagagtgagactctgactcaaaaacagaacaaaaaaaaaaaagaaaaagaaaagaaaaaaagaaaagggaactcttgtacactgttgatgggaatgtaaattggtacaaccacatggagaacagtttggagggtccccaaaaaagtaaaaattgagctatcatatgatccagcaatcccacttctgggtatatattcaaaagaaaggaaatcaatatatcaaagagatatctgcactcttgttgcagcattgtttacagtagttaagatttggggacaacctaagtgtatatggaagagatatctgcactcttctttgatatcttgtaatcagcatattgaagagatatctgcacacctttgttgcagcattgtttacaataaataagacttggaggcaccctaggtgtccatcaacagatgaacgataaaaaaggtgataactatatataatggagtattattcaaccatataaaaggatgagaaccagtcatttgcaacaatgtggataggaactggagatcattatgttaagtaaagtaagccagacacagaaagacaaactttgcatgttcttacttatttgtgggatcaaaaaatcaaaacaattgaactcctggaaatagagagtagaaggatagttaccataggctgggaaaggtagttggggagctggggaaaggtagggatggttaatggtacaaaaaatagttagaaataatgaataatagctactatttgatagcacatcagaatgactatagtcaataataattcactagcacattttaaaataacctaaagagtatactggattgtttgtaactcagaggataaatgcttgagggaatgaatatgccattctccacgatgtgcatatttcactttgcatgcctgtatcaaaacatctcatgtatcccataaatatatacacctactatgtacccagaaaaatcaaaaatttttaaaaaatcaattaagagttattggagtttaaatttacaatttaaatttaggtaagactttgtgagatagtgattgaatttgaggagcaattaatatagctaacagtggacacaatgctgagtggggctgtgtgtcttctcctttgggggaagagtcagaacttcctctcttgccaatttgtgtagaaaggttcatgtggaaactgagtagctaaagtggtggactgtttcatttattaatttattgcctctcatctctaaatgcagccttccatgtatactctatgataaacaacaggattggtttaagtatttcttcaaggtgaatatgagggtaagctttctcagtagactgtgctggagggacattgtaggaggtaaaggctaactgcaatttctggagagagggtttggcaatgggtgcatgaagataaccagtggagcctgccccagccatgggtcagaacactattcccctgtgacctcacagcctctacctggtgatgacctttctgtagtcctcttggtgataacctttctgtagtcctctcaacatgaaaaccaaaactcccaggcagtctacacaaagacctgtggtgcaatgggtcatacactacgcagcctttccaaaagaccccatgcagcctgtgcaagcagccaagggcccaggcaatccatacagagcttcttctccctttgcaagtccccatgcagcccacatgctctgaagacctttgctgccactggcacctgaactcctacagcatgtccgtaccaccagttcttgatcacctgttccctccctgcactccatggagatgcctatcatttgctcagaatttccagaccatctctggtctagctaaactactgtacttctctgccatctggcaatctggtggttcaaccttaccttctcctccaaggtccaaactcccttccacatttgttcttctctggatactctcccttagtcctaaggtactatatagatttaccctcacatcttatacttaactcctttactatagttaatattctcataataagcatcccctgtctaacctactgtgttgtttctactttgtcattggtctcaaattctataataatcttcttgattcaatattctttggatataaaaaaggaaaaaaaaaggtactcattacttttggggaggaccatgagattaggtttggatgttgaagatattttattcttcttcataatacttgaaattttcatatggaaactatttcataggatacacagacaacaaaatcattgaacaaaaagttgtgccttttgatatgctgaaataatcattaacatgcacataattattaggaattaataattctaattaacattaatattattagaatataattattctgaacctaattataaagaataataatttattaatataatcagcaaaactcatttgcatttatatatcaattacatttctgggtattgcttgtcatataactggcccggtctatctgtaactttatcttctaattaaagataagccacagctaaatatctcgttgcagccaaatgccagatggaagggcaaatatgatttagagaaattctgctaatcattacttttcaacctatgttggttaacttttcacaggatcagggtagcaaaggtttgaaaaatgtaatttttcattattcctccaatagaacattatttttaaaaatactgaatttataagtattagtgcggtttcaaccacatttaaaagatatcactaagttttcaaggagcttacatccctttctatgtttagcactcatattggttgctaaaccattgaaaaagtttaatattttatccctggcatatcacctttgttacacacacacacacacacacacacacacacacacacacacacacacagtactgatacattgttataaagctaagttaaaagttctgaagcctggaaattctagaataagtatcaactacatgttgcattttctaaaatgttttacaaaagcctacagacttggtgttagaattctttaataaaaccctcacgtctcatgtccgtctgataaaaaaaattagaaaggaaaaaagaatgagaagtcttagatatggcggacattgttgaattctctaactcttttgacctcaaagtttctggttgatagggaatataattaaaatgtagaattcacagcaattagtcttttgtgtctgatttttgcatatctcggaatagatataagttaaaatactcctattaaaattacaatggaggccgggcacggtggctcactcctgtaatcccagcattttgggagacagaggcgggaggattacaaggtcaggagatcaagaccatcctccctaacacggtgaaaccccgtctctactgaaaatccaaaaaaaaaaaaaaaaaaaaaaattagctgggtgtggtggcgggcgcctgtaattccagctactctggaggctgaggcaggagaatggcgtgaacccaggaggcggagcttacagtgagctgagatcgctccatcgcactccagcctgggcgacacagcgagactccgtctcaaaaacaaaacaaacaaacaacaaaaaaacaaaaacaaaaccaaaacaaaaattatgacggaataaatatgaagacttagacatgaccagaaaaatctttttttcttttcaatctttaaacatattttttatatttatatattttttccataagttattgggataccagtggtatttggttacacgagtaagttctttagtggcgatttgtgagattttggtgcacccatcatccgagcagtatacactgcactataattgtagtgttttatccctcatatcctctcctactcttccccacaagtccccaaagtccattgtatcattcttatgcctttgcatcctcatagcttagctcctacatatcagtgagaatatacgatgtttggttttccatttctgagttacttcacttagaataacagtctccaatctcaaccaggtcactgcaaattatgttaattcattcctttatatggctgagtagtagtccattgtgtgtgtgtgtgtgtatatatatatatatatatatatacactctcatatatatgtatgtgtgtgtatatatatatatacactctcatatatatgtatgtgtgtgtgtgtgtatatatatatatatatatatatatatatatatatatacactctcatatatatgtatgtatgtatatgtatggcactctcctatataaccaaccagagtataaaaaggtacaacccccttggaaaactaacagtaaatatagctaccccatgacccagcaattccattccaatgtatctaaccaaagagaaatgagtacatgtactcacaaataaacttgtacaaaacttttcatagcagtcttattcataaaagccaagtcatagggaaagaacaaaacaaaacaaatatccatcgacagaataatgaaaggacaaactgatgttttcctacaatggaatacaacaaagtaatgaagaaaagaaattagtgatacatgtacagtgagttgaatatttgtgttccctccattcgtatgttgaaatcctaaccaccaaggtgatggtactaggaaatgtggcctttgaacgttgtgtaattattacaacaaattattacaacattgtgtaataatttgaagggtggttagttcatgagggtgaagccctcattaacagtattcgtacccttataaaataggccagggagacccctcaccccttccatcacatgaggatacagtgagaaggtgccatctgtgaaccaggaggaaggcccttatcagacaccagatctgcctggcaccttgatcttagacttcccaatgtccaaaactgtgataattaaattcctattgttcataatccactcagtttgtggtattttgtatgacaacttggatgtactaaaataatgtactaaaataatatgcaacaagttggataaataaatctagttatttggataaataaatcaacttagccagtcacgaaagttggtaaactaaagaatcccatgaagttcgaaagcagatgaaactaatctgcagtgacaggaaacagaacagttggtgcctgaggatggggatagcatgaggattgactaggaagggtcacgagagaattttgtggggccctagaaatattctagatctttattggggtgacagtcacatgaatatacatatttgtcttaataaaactatacacatagagtcatgcatttgctatatgtaaaatactatgatctaaataaatgagttcataaattaatacatatatagcatcaattttaaaatacttgctaattgtcttctaccctactactaattattactattattactacttgtgttttttgatatcaaatgccaaatgtctatctcacagctgtgagtggggtgggaatggcttagagtaaaaagaagataatagcctgtaattatttagtattatgagttctggaggcccactgtggttgaatctaggctcagctgcttgctggctctgcaaatttaagcaagtctgcttaaattcttctaaacctttgttcccattctaaatacacaggtaatgtacctctcacagtttttttcttctttttgagaattaaaacatttgtaagataacctatgacatgtaataactacatatctactgtttttattttaatcatataaattcttgccgatttttgcaggctatgttgaaatgtagttttaatttgatttttggcattattattttatagtcttgcctacgtactttttatgtgtttgtgcttaagggatttataggaaattactttcatattaactcactttatcttttgattactgtttatggataatcactctggtgactggttgacttttctgaacgttattattaccacagtcaacatgattcgtataatttcctaggaaattaaaagcttactaaagtgtaagctgcttgagagcagaaactgctatatccatggttatagccatctcttatgcacatggatctagcatattgtacaagcctaataaatattgatgaagtcaataaatcaatatatttgggaaaaaaaaaaaaactagacctgtatcatgcccaaactaatttcaaaaggttgatagtatatatatatttcatacaatgcactaataatttctaaaatagtagtctcaagatgaactttgcatccagaaaagggttttgtacctgggtcagagatacttttctttggatgcataagacttcgtgtgatcacaggacagcagcctcggaatggtgttatcatggctggaggtggctggagggatataagcaggatctaagaaatctgttcgatacaggaaaaccttcactaccagtggcagaaggccaaaaaagggcattggatcaacttctgggctcctacaaatttctgtgaaatttgtcagattatttttcctctagtattgtaattgaatggagctcaaagtcaaaaccactcctttgctcttttgacacccttgctttttttaaaaaaaaaaaaaacttgtttccccatttttatgttaatggaattttatctattgctttacttccgcagcagatgacaaaatccagacttcagatacagccacagattaatctaaaagacttctggattaaatatcctgtcaaaaagcatagttgaaatgctaattctacagaagtatttggaccagtgagatataaggaaaataggctgaattgtgagacatgtgaacatttttaaaaatgtttattttcactaaatgaaaaccagagagaaaaggaaagctcgtgtaaaatagtttaaagaagcaaatgtttgtggaattcattttgatactgtaaattgtaaaaaacaattctgaaatcagattatatctatacctatctatccaagtgtgcattttaaaaggcggcattggctgggcgcggtggctcacgcctataatcccagcactctgggaagctgaggcgggtggatcaagaggtcaggagatcgagaccatcttggctaacatgataaaaccccatctctactaaaaatacaaaaaattagccgggcgtggtggtgggctcctgtagtcccagctactcgggaggctgaggcaggagaatggcgtgaactcgggaggcgcagcttgcagtgagccgagatcatgcccctgcactccagcctgggcaacagagcaagactccgtctcaaaaaaaaaaaaaaaaaaggaaggcattgcttgcctacccccagtgatatttaggaatgcttgaggggatgtttattacctaacaaaattgaagagggaggtacaactggaattttatatatgtaatatttaatatatgttataagtatatttaatgttatgtatgctttatataattctttggaaatgctaatatccttctcaagaagcatgatacttgaaatgtaatgttatgcattgctttgaaatgatattagatatgaccacaagaaaactgacagacaagcttaaaccaagggtcattctacaaaacaatgtcttgtaattctcagttataacaatttgaagaaagagaaggaaaggtaaggattaatgcagattgagggagagtaaagagacatatcaactttgtgaaaagtatgatcctgggctggatcctgcatcattgggaagaagaaaggacagtattggaacaattggcaaaaattagattcagactgtaggttagatagtagtattgtaacagtgccaaatttcttacatttaatcattgtatcatgattgggtaaaaaaatacatttgttcttaaaaaatacatgccagaggatttaaagacagagtcatggtgaatacaacttacttgtaagtggttcaatgaacaaaacatcacagttacatgatatttatacccatattgatactgttagccacatttacgtctatatctataaagagaaaaagaaaaattggtaaaacaaatgtgaaaaatagtaacaatttgcaaatctaggtgaaaagtatttggcaattcattgtatttttacaattttttctgtactttttttttctaatacagtgttgtttaaaagaatgagattgggagatagttttaagtgctacaggcatagctagggtaattctgcttatgaaacaggacaactgcaatgtgatatatgtcacaggatggtttcaactaaatgttcttttcgaatgtactattaattagtgcaatgatatcaccgagacccaggaaattgactcattaccaatattaaaagaaaaaaaaacttcaaagataagcctgtaatgccataaaatagatttttagggctgggggtggtggcttacacctgtaatcccaacacttagggaggcagaggcaggtggatcacctgaggtcaggagttcaagaccagcctggcaaatgtggtgaaaccccgtcactactaaaaatacaaaaattcgccaggcatggtggcgagtgcctgtaatcccagctatttgggaggctgaggcaggagaatcgcttgaacctgggaggcagaggtttcagtgagccgagatcgtgctattgtactccagcctggtcaaaaagagttaaactccatctcaaaaaaaaaataggtttttcaaatttaattttaaaatagtaaaagtggttgtattttactgtgaccaaaataacaacagctagattgaatttttcaatttcagaaatgctgttgagactcgtgtagccaattcagccagtccagattgttgagttgagctgaatttaacttagagttaatctagcactattgatttgactagtatagactcaaccagacattcatagtatagactcaaccagacattcatgattcatgtgggttaatgttcagagtattaccgttatgtggttaagtatgaggaaaaaaaagtcctaaaacaatttacttttcttcataataatctctctctgatcccccaagccctgtccttggtctcttcttctccctctctctccttctctgtcagtactcatgtgagcacatgctctttgttgtcatagactagtaaaagtatatttaaagtaggactgttgcttcatgcttttttgttgcttgggggaaagcatataccacttgcagcttgtgtcacttagatgttgtagcctttgcagctaatggaaagtggcagtacaggatatctttttctgtccagtgtcaaaaaattggcctttgtttggtcaactttcaggaacttccatttactccagtggaaaatgaaacacttgtgaaataaagaaatattgtcttcaatgggaaatgcattccatgtgcggtatatatcatattatgacagattttattgagactgtactatttttattcacaacatgaatgcaagacttttttcaggggtctgcattataaggcagtggttatttgcatttgtgagaagagacaaaaaatgtttaatgtttttatagttaaatatcatttttaattcaagttctcaataaaatacttccacctcttgtatataaagtttgtttcaaataggaaaagtctgtttttcttaggtgcagtaacaagagtttaaggatggaagatgagaggacatgtcagtgtccatatcgtgtcattcttgtgaaacttgccaatccatgatggctttatccttccacttatctacacttactgagcaagtggcgttacaaagtccaagattctggaggagcatggataggggtgcctcagagtggtctgacatgcttaatatttagagaatttacaagccatggcgcagaatcctggagatatttgcagtgagaatggaaatttggtagttaacatgttccaggagcgggagagcagtaggagttggaatggtttgattagttagttgtcattagctagaaccacagaacttacaaaaggaggagaaagctggagacatgcagatctatcctgaccatcctgataccctaatgaaatgtatgaattcagttcttagaaacctatgtgtgcgcatgtgccagctggaggaatctgcagatctctgaggactgtctgtggaccctgtttagagtttcagcaggtgataaaacgttaaccaggtttacataggcctctgtccttttaacattccatcctttcttccttatgaagctttaaagtctccccagtaattttaagagtcaaccgctagccctttgagactttattaagtacagtaattccattgccctaaacataaactctttgacacatcccctgacagtaatctattccttgcagagtttaggggcctcagcagccacagaatgttttcattatagagctctgggcttcctcttgtctgaggctttaagtaatgatgagatcccttaagttcaactacttcacaaaaactgcattgcaatcctaggcccagtttgcttcagaggagtacagagccctaagctgatgatcaggctctatctaagaaatcttggatttaatatctgcctttatccttttcaatctccccactgcaactaaaagatcttcaacctgttttcttaattgtttcggaataagtctaggaagttgagctttattacccagagggagcctagcatttatttattgtattcgactgttatgtaaactaaatgactattgttacagcttccgtgtgtatttcaaagagcattgtcatttatttttctgtgctttaacaattctgtatagctcagaggttcaccacgtaaagggaaacccaggaccagtggcagcagagatacaccctggaagcttgtcagaaatgccagaatctcaggtcctgcaccagacttgcagaatcaggacctgcccttcaccaaaacccacagagattttaatgtattcgaaggtttgggaaactctggggagacaacagcatttagttgatgcttccgaattactttgcctacgaagtaggaatctgattaacatattttctaccacccaaccagagtgcttagcataaaaattattctgataactaaattgtttttctgctaagttaaacttcatttgggaaactgtcttgtatttttatttcaaactgctaaaatgtcaaaaaaaaaaaaaaaaacaaactactatccactagccattcattctttaagaaattaggatcctataatccagacttataagaaaagttctcagcacctaggatagtgacaggtcctgccctatattagatgccttcgtgaggtgagtcttgcttgtcgtcttttccccataaaagcaggtggtccaacgtggtcatcagtctcatctacagcaatgacacacactaggcccacactcaggcctgtttcgctgtaaatttcctccttgttccactattccgcataggataaaattcagaaacgtaggaagacttcaattccaagccattgtctagctcaggagttttcaacctcggcacgactgatttcgagactgaatacttctttgctatgggaggctgtcctgtgcattgcaggatgtttaccacatccctggcctctccccactagatggcacacaaccattccctcatcaccactctacttcatccaccctcccccgccgttgggaccacacagaagtctccagacactgtgaaatatcccctgcgggagaatctcctgtaactgagaactgatctacaaatatgtgaatatgtgcagttttatttattcctagctttaatatgattttctctatcacctaactcttcctcataagactgctccactctattaaatagaggttccagggacgaaagctttaagccttccacagttgacaccagtttgtttgctccactttcttagagttccatactttcacagagacaaaagggcattcagcgtctgcttaattatcttaacaggtgtgttcacaagttatgagtcttgttcttcttcagtggttgcattagaagcattgcctgtgggaaggtaaagagatacctatattatggaaaaagttttggtttagaaattaaatgtgcagactttgaagccacatttccctccaccacatcctagctgagtggtcttgggtaagttacctcctgtttgttttctctgtgaaacagagtccaagcagatagtgttattttaacaattaaatgatatatcccatcaatacttagaatcatgtctaacgcagggaagatcaataatcatttattattattatcccttcaacaattatgtataacttaggatcttgtctgggacagaaggcgatccaagatttcttgcataaatacatactccatggtcatgacttttattccgatcaaagttgtaggctatgttttgcatatttaaattgcatcattttaacattggaatattaccatggaattttctgtcctggagttggaaatatacttaaacatgtgagttgattgttagaatccactaccctttattcaattcataaaacattcagaattgagtgaaactaatcaacgtgtgagagatttacctttgaagctttggttgtggggagtggagtagtaaattgaagggattccaaagaggcttcttgggatattcctgttgctttttttttttttttttaacctgggaacaggatacatggaagtgttcagtttgtgaaaatcaattgagctgttcacttttctttatctatttatagttccataaaatttcaaatatacatacagatcaattagagaaaaataaaaaccttgttctacacctaaccatattgtttagagaacagttgagagtaccagaaataatacattctttggtattttgttgaattatggctcttgtattattcagatggttttctagagaagtctgacttcataaactctgtctgcatttgtgttgtaaatacgggatgggctgtgaaacgaaattattatatggttgtttatattaacctagccaaacacaaacctgaatttttttaacccagacataatattgagaagtactacttggatgacttaaactatatttttagctactcgtgctattgttaatgtgaaaaatataaaactaaattataggtccccctattttcattatgggacaattttacagctgtcaaaaagttgtatttcacacttcccacattcacaaggctacattcgtacaacagtttataagtttttttttttttttggctttttcctcagtagctgaaaagttgatatagtaatgattttgttgcaaggttgtcaaagtaaataggccacaccaagcatagacaaggaatcttaaatctcagaaaaagacgaaatttagtttataaccaagaatggtaaatagaggagttgtggatggaatttccatattatgcccaaacctcttgaaagtcaaatgtttcaacttttcatcccattttttttgctctggaactgctacagaggagtccatttgactgacaggggttccatgcttttttgtgtcttctgccctgtcttatatggaagtgccaataagcagagaaccaatggtaagatccaaggtcacacagcaggctgaggaatagatgaggccgttgcaaacctggttaaactttcaataagaccagcagctcacatagtttagagaagattgattgtgaaaacttagtagaacatgacaaaatttttttttttttttttttttttttttagagtcttttttttttttttttttttattatactctaagttttagggtacatgtgcacattgtgcaggctagttacatatgtatacatgtgccatgctggtgcgctgcacccactaatgtgtcatctagcattaggtatatctcccaatgctatccctcccccctcccccgaccccaccacagtccccagagtgtgatattccccttcctgtgtccatgtgatctcattgttcaattcccacctatgagtgagaatatgcggtgtttggttttttgttcttgcgatagtttactgagaatgatggtttccaatttcatccatgtccctacaaaggatatgaactcatcattttttatggctgcatagtattccatggtgtatatgtgccacattttcttaatccagtctatcattgttggacagttgggttggttccaagtctttgctattgtgaatagtgccgcaataaacatacgtgtgcatgtgtctttatagcagcatgatttatagtcctttgggtatatacccagtaatgggatggctgggtcaaatggtatttctagttctagatccctgaggaatcgccacactgacttccacaatggttgaactagtttacagtcccaccaacagtgtacaagtgttcctatttctccgcatcctctccagcacctgttgtttcctgactttttaatgattgccattctaactggtgtgagatgatatctcatagtggttttgatttgcatttctctgatggccagtgatgatgagcatttcttcatgtgttttttggctgcataaatgtcttcttttgagaagtgtctgttcatgtccttcgcccactttttgatggggttgtttgtttttttcttgtaaatttgtttgagttcattgtagattctggatattagccctttgtcagatgagtaggttgcgaaaattttctcccatgttgtaggttgcctgttcactctgatggtagtttcttttgctgtgcagaagctctttagtttaattagatcccatttgtcaattttgtcttttgttgccattgcttttggtgttttggacatgaagtccttgcccacgcctatgtcctgaatggtaatgcctaggttttcttctagggtttttatggttttaggtttaacgtttaaatctttaatccatcttgaattgatttttgtataaggtgtaaggaagggatcgagtttcagctttctacatatggctagccagttttcccagcaccatttattcaatagggaatcctttccccattgcttgtttttctcaggtttgtcaaagatcagatagttgtagatatgtggcattatttctgagggctctgttctgttccattgatctatatctctgttttggtaccagtaccatgctgttttggttactgtagccttgtagtatagtttgaagtcaggtagtgtgatgcctccagctttgttcttttggcttaggattgacttggcaatgcgggctcttttttggttccatatgaactttaaagtagttttttccaattctgtgaagaaagtcattggtagcttgatggggatggcattgaatctgtaaattaccttgggcagtatggccattttcacgatattgattcttcctacccatgagcatggaatgttcttccatttgtttgtgtcctcttttatttccttgagcagtggtttgtagttctccttgaagaggtccttcacatcccttgtaagttggattcctaggtattttattctctttgaagcaattgtgaatgggagttcacccatgatttggctctctgtttgtctgttgttgttgtataagaatgcttgtgatttttgtacattgattttgtatcctgagactttgctgaagttgcttatcagcttaaggagattttgggctgagacgatggggttttctagataaacaatcatgtcgtctgcaaacagggacaatttgacttcctcttttcctaattgaataccctttatttccttctcctgcctgattgccctggccagaacttccaacactatgttgaataggagtggtgagagagggcatccctgtcttgtgccagttttcaaagggaatgcttccagtttttgcccattcagtatgatattggctgtgggtttgtcatagatagctcttattattttgagatacatcccatcaatacctaatttattgagagtttttagcatgaagggttgttgaattttgtcaaaggctttttctgcatctattgagataatcacgtggtttttgtctttggctctgtttatatgctggattacatttattgatttgcgtatattgaaccagccttgcatcccagggatgaagcccacttgatcatggtggataagctttttgatgtgctgctggattcggtttgccagtattttattgaggatttttgcatcaatgttcatcaaggatattggtctaaaattctcttttttggttgtgtctctgcccggctttggtatcagaatgatgctggcctcataaaatgagttagggaggattccctctttttctattgattggaatagtttcagaaggaatggtaccagttcctccttgtacctctggtagaattcggctgtgaatccatctggtcctggactctttttggttggtaaactattgattattgccacaatttcagagcctgttattggtctattcagagattcaacttcttcctggtttagtcttgggagagtgtatgtgtcgaggaatgtatccatttcttctagattttctagtttatttgcgtagaggtgtttgtagtattctctgatggtagtttgtatttctgtgggatcggtggtgatatcccctttatcattttttattgtgtctatttgattcttctctctttttttctttattagtcttgctagcggtctatcaattttgttgatcctttcaaaaaaccagctcctagattcattgattttttgaagggttttttgtgtctctatttccttcagttctgctctgattttagttatttcttgccttctgctagcttttgaatgtgtttgctcttgcttttctagttcttttaattgtgatgttagggtgtcaattttggatctttcctgctttctcttgtaggcatttagtgctataaatttccctctacacactgctttgaatgcgtcccagagattctggtatgttgtgtctttgttctcgttggtttcaaagaacatctttatttctgccttcatttcgttatgtacccagtagtcattcaggagcaggttgttcagtttccatgtagttgagcggctttgagtgagattcttaatcctgagttctagtttgattgcactgtggtctgagagatagtttgttataatttctgttcttttacatttgctgaggagagctttacttccaactatgtggtcaattttggaataggtgtggtgtggtgctgaaaaaaatgtatattctgttgatttggggtggagagttctgtagatgtctattaggtctgtttggtgcagagctgagttcaattcctgggtatccttgttgactttctgtctcgttgatctgtctaatattgacagtggggtgttaaagtctcccattattaatgtgtgggagtctaagtctctttgtaggtcactcaggacttgctttatgaatctgggtgctcctgtattgggtgcataaatatttaggatagttagctcctcttgttgaattgatccctttaccattatgtaatggccttctttgtctcttttgatctttgttggtttaaagtctgttttatcagagactaggattgcaacccctgcctttttttgttttccatttgcttggtagatcttcctccatccttttattttgagcctatgtgtgtctctgcacgtgagatgggtttcctgaatacagcacactgatgggtcttgactctttatccaacttgccagtctgtgtcttttaattggagaatttagtccatttacatttaaagttaatattgttatgtgtgaatttgatcctgtcattatgatgttagctggtgattttgctcgttagttgatgcagtttcttcctagtctcgatggtctttacattttggcatgattttgcagcggctggtaccggttgttcctttccatgtttagcgcttccttcaggagctcttttagggcaggcctggtggtgacaaaatctctcagcatttgcctgtctgtaaaggattttatttctccttcacttatgaagcttagtttggctggatatgaaattctgggttgaaaattcttttctttaagaatgttgaatattggcccccactctcttctggcttgtagggtttctgccgagagatccgctgttagtctgatgggcttccctttgagggtaacccgacctttctctctggctgcccttaacattttttccttcatttcaactttggtgaatctgacaattatgtgtcttggagttgctcttctcgaggagtatctttgtggcgttctctgtatttcctgaatctgaacgttggcctgccttgctagattggggaagttctcctggataatatcctgcagagtgttttccaacttggttccattctccacatcactttcaggtacaccaatcagacgtagatttggccttttcacatagtcccatatttcttggaggctttgctcatttctttttattcttttttctctaaacttcccttctcgcttcatttcattcatttcatcttccattgctgataccctttcttccagttgatcgcatcggctcctgaggcttctgcattcttcacgtagttctcgagccttggttttcagctccatcagctcctttaagcacttctctgtattggttattctagttatacattcttctaaatttttttcaaagttttcaacttctttgcctttggtttgaatgtcctcccgtagctcagagtaatttgatcgtctgaagccttcttctctcagctcgtcaaaatcattctccatccagctttgttctgttgctggtgaggaactgcgttcctttggaggaggagaggcgctctgcgttttagagtttccagtttttctgttctgttttttccccatctttgtggttttatctacttttggtctttgatgatggtgatgtacagatgggtttttggtgtggatgtcctttctggttgttagttttccttctaacagacaggaccctcagctgcaggtctgttggaataccctgccgtgtgaccctgctggggggtgcctcccagttaggctgctcgggggtcaggggtcagggacccacttgaggaggcagtctgcccgttctcagatctccagctgcgtgctgggagaaccactgctctcttcaaagctgtcagacagggacacttaagtctgcagaggttactgctgcctttttgtttgtctgtgccctgcccccagaggtggagcctacagaggcaggcaggcctccttgagctgtggtgggctccacccagttcgagcttcccggctgctttgtttacctaagcaagcctgggcaatggcgggcgcccctcccccagcctcgttgccgccttgcagtttgatctcagactgctgtgctagcaatcagcgagattccgtgggcataggaccctctgagccaggtgtgggatatagtctcgtggtgcgccgttttttaagccggtctgaaaagcgcaatattcgggtgggagtgacccgattttccaggtgcgtccgtcacccctttctttgactcggaaagggaactccctgaccccttgcgcttcccaagtgaggcaatgcctcgccctgcttcggctcgcgcacagtgcgcacacacactggcctgcgcccactgtctggcactccctagtgagatgaacccggtacctcagatggaaatgcagaaatcacccgtcttctgcgtcgctcacgctgggagctgtagaccggagctgttcctattcggccatcttggctcctcctcgacaaaatttttaaatgaataaaattctctagtataatattaaaaatgtaatatcattcacagttcaaacaaaaccacatctccatagcgtagaaaccatgagaaagtttctaacagtaatactgaaatatccttgctttttttaaaattgtacttgcatttaacaacagaaggttttaggatgtacttcttataaactatctttgtgtatgagcaccatcaattaattttacccataggaagaaataatcatcataaatttccaagctgacacaggctgaggctcagatcaggtgaggtgtcgtcatgaatgtccttcctcttctccttctaaatataagccatgtttgtttcccacaaagaacatggtggcttggcaagaaggattcccattggtctaataaaacaaaaactaacttatatttaatttctatgcctttttcacactctgagagtgctaggccaggcctcttcaagcccttttcacaaaggaaagcagagtggttagtaaaaagaaaaaataaataaataaaaactatacctgctttgccttgggttcaaagactaagtacaggcttcatctctggggtggagggtggaattctcatgacagcactgggtatgtcctttgttttctctgttcactcgcagtccttttaatgttctcgttaaatgttattaacaagcttttacaaagcacaactacgaaattccagggagagtcaagtggcagagtgaacagcaagtggaatgtaagacaaccaaagtaactaaatttggacatcctcagctcaatgaaattgccaatggcaaataagaattgggggtaggaagatttgtttttgagtgtgacataaagactgtaaaaagattaggaccaccaattgccacacatttatctataccataataattctcacaccagagtgaggtgtatatgtgttagaaataggggatacacatatgtccatagaactaaaggtagcaactctaagaaaaagcatcaaaacaagcaaatgaataaaaacagtcatgtaagacaaggggttagcaataggcatcatagataactaaacccaatgacaaattattcactggtggaattatgctaattttgttgttttctagataactccatgtggcattacaggaatattttcttctagatcccttggttctatcagttcttccacctaagtctagagcttcctaatctctgaaagggacattgtccctctctatcaaatagcagcttcatgcacatttgcagtttattttctgaaagtaagggtcagtatgaatcaagcaatgcagacctgagactcactttcctacctaagtgaagctgattactcagtgacctgttcacaacttttgggcaacttagagttctggagtcaatcagtccctggagctatctccatggagctgaataaccgctgtctcggcctgccaaaaggtttttcagctcagtgctattcttgaatgacactctgtcattatgctatatttaggtcatgaaagttgtaattagctttgttctgctgcacactgatccagcctcacatgcaatataaaaggtaataaaataagtaggaagatataaaaacctaaataagcctcctatgcaggaaatttcatcattacaaaactgatgaaagatccaaagaaagggagactctatggcttcaaaacctggcaaagaagtctgttagcagaagcaatcaaagaagctaggcttgtgtatggccaacttgcaacagaatttttaattaaccccctcattacagccccaccctgtcccctgctcttccccaccgaggtgactgttctgtaatttgattacatttggtggaagctccttttctcataggacatctcacatcccttttaggagccagctctgcctaataaacggacttttagaattatactatttagtatccgtacattatcccttatggttattgcctggacctgagccatctgttttcaatgacacacagtattctgtgtttgcaggaatgggtgctgcttatgagagaggagctggaaggagggcaaaagaacatgaaatccacagtcagtaccaaaataaccacaactagctgatatggccgctttcattctccaacctggttataatctccttgaaggtgacaactattgtctctcacaagttttaaacatgagcctagtgtaggttattaataaatgcttattgagtcatcgaggggatgcacttaggaaaaacaacatgctttcccaagacccaagttaaacatttttcatctaatctttatttaactattgacaataattttcctttttgatgtaatgtatgacttcagggagcccttgatatttcccagttttattcaatgaataaaaattcaaagaaaaagaacaaatggagaaacataggaattattttcaaaaagaaaattatatattttattttattttatttttttatttttttattttttattatactttaagttttagggtacatgtgcacattgtgcaggttagttacatatgtatacatgtgccatgctggtgcgctgcacccactaactcgtcatctagcattaggtatatctcccaatgctatccctcccccctccccccaccccaccacagtccccagagtgtgatattccccttcctgtgtccatgtgatctcattgttcaattcccacctatgagtgagaatatgcggtgtttggttttttgttcttgcgatagtttactgagaatgatgatttccaatttcatccatgtccctacaaaggacatgaactcatcattttttatggctgcatagtattccatggtgtatatgtgccacattttcttaatccagtctatcattgttggacatttgggttggttccaagtctttgctattgtgaataatgccgcaataaacatacgtgtgcatgtgtctttatagcagcatgatttatagtcatttgggtatatacccagtaatgggatggctgggtcaaatggtatttctagttctagatccctgaggagtcgccacactgacttccacaatggttgaactagtttacagtcccactaacagtgtaaaagggttcctatttctccacatcctctccagcacctgttgaaaaagaaaattatatattttatatatccagaattagaaagagagaagagaaaacaaaaagtggttcaaagtcaagtagagaaagtctattgatgagttggaatatgatagaatatgaacttgagggagtaaatgtggtgcttgttatgttgtctccaggggtgggctaagagtgttatttcttttattctgtgggttatgggagataaggtggaaggtgaagggtccctcatctaacttaaagaagagtccaaagaataaaaagggcaaatggtatcatgcagataagaggatggaatttagataccaggtagatacagaaatgttctctctgttcttttccagcactgggtttgaatgtggtaacatgaactagatgcaagggagcatgtaaaacaataattcaagcaataccttatattctcactctgttgcctaagttagaatgcagtgggaagatctcagctcactgcaacctccactcccaggtgcaagcaatcctcctgcctcagccttctgactagctgcaattacaggcgcatgccaccatgcccagctaattttttgtatttttagtagagatgtgagttcgccatcttggccaggctgttcttgaactcctgacctcaagtgatccgctgacctcggcctcccaaagtgctgggattataggtgtaaaccattgcacctggccgtgataacttttaacaatttatctaaatatttttgcattgatcttcatattcaatctgcacagctcttcgaagttcattttacagctgagtgaactgagaaaagtcaagcagcttgattgaccaagttctcagctggttaaaagcagaggccaggagcagtggctcatacctgcaatcccagaaatttgggaggctgagaaaagacacttgcttgagctcaggagttcaagaccagcctgggcaacacaacaagacccagtctctatgaaaaaaaaaaaaaaattagtccggtccagcaggtggggttgaagtgggaggatctctttacctcaggagttcaaggatgcagtgaactaggattgctatgggctgcgctccaacttggatgacacagcaagaccctgtctcaaaaacaaaacaaaacaaaacaaaagccaagattcaagattcaaacctagatctgtctctcagtgtaatgctcatttaagtcctttactccatggcctgaaaagagcttcaacagccttgaagggaaattagacatcaagaaggtttacaatttccaataagattcataaagaaaatagttgtcatccaaggctgcaattttatctgcatttttatgactacagtgtcccaaatcccaatgctatcaatattccatttctagtcagtttccatttcttcatcagtgtcaagaggcaaaaatactgattccccttttgccactgattagaaagcatggtgttcagggctgacaaagtaatgataaaaagaactcaaggaccttgagtgattaagggtgaagttaagacatcggatgttgtcttctcatttttctgatgaccagtaacaattatgctgttgtttgtaagagaggatgtagaaagttccgttgtgaatttcttcatgcttagtgagtgggcttacgttgttataataaatacgtgtttttaggtggggggagatttcagattgtatttttttctcaacattgcattttttacattttagacattgaattatgattcagcttataaggagaagagaattaaaaaatagggtatgtgaaaggtttaataacacttcttttatccagtttagtcttgaattttaagtttatgaacttttaaatcaatatgcaattgttttaaatgtaaaaatgtattttaggccatagcattaaatgaaaagttcagctataaatgttattcataacaaatgacattttttcatcactgtggacttcatttgaaggatttgacattttacagtagttgacagaaaatggaaaaaacacaagcttttttttttttctctctctctctctctctgctttaataattctatcctggcccgacataggtacttttgccccctcaaaattttcaaaattgtttttgctgttgtgataagaccaaagttattgagtttgagactggaaggaattttctttaggaaaatgtgggaggtgtgattggaaggaaaatgggtttgaggagagcgggagcacttgcagtgctgtttcctggacaaggtgtccacccaactcactttataccaatctcaataagaaaaagacaatccagccacactgtgtcaccccaaatcagatttcaactttgcacatttttttcttaaaagggttaaaaaagttgtttttaggaggacacactcatgcacataaaactactgaacactttctgctaaaatctaaaaaaaaaaacttttaaaatgggagaggtgcatattaaaatgtgagaggaaagtctcattatcaggcctctaacaaataaaatgagccttgagattaaatattgttataatcattatgaacattagctttccttttctctccaccccttttttgtgtgtcacacaaattctcacaggtggttctaattagacataaatagtgacagtggccagtttgacaaatccagattccggccaagagtaatggaaaaaagtctcagcttgccttcttaaaaaacggaatctatattgagacagttcaaggaaatgatgcctctggtgagatgtaaaaaccatagctcaagcccctttgtgcattctccctttagggagtcaaagcagcataaaacacctaacggcatgttcctccctgcccatattaaattccaggtttctcaaagaaagcttgtattcgtctacctaagacaaactttgaccaccttggcatctgataggaagaaaacccaaaaaccaaaaaacaaaagaaagcaagccatgtatgctatctctattgtcttgtaattttaatccttttatatggaatagttgaatgggtatttgataattctgtcaagtcacttcctaaatacttcactgtttttataaaaacttttatcacctttagtttagtagggcaatacagaaaaaggataagtctttttaaagaaactttccaaaaatcaataggttagtaaaacgtggattgttcagcatgcatgttccaggataacagcctttcttcctagtcatgttctctttcttgttatttcacaccagtgtcctatgaagccaacacactcatccttggataagaaatgtctataaaaatttatacaggtatttaatggacatgctgagtaatttttagatctccttaagcagcgccgttgcatataattgggtcactgccctaggacactcagccagtgggatcagtgaaggttaaaatccagcccatgtgtctttcacaaagccttatccccttcctagcaagggactgcatctgcctggaagaagtgacaagttttctaatttgcagagactgggttttctgcatcctataagtcgtttttgcaaacctaaccaaaaagggaaaaaaaaggattatttactaatgtaataatttacttatttttgccttctctttaaatatctgaacatatgaagaaccttaacacttaaatttttttccagaaatatgataaggcacaatatatcagccactgttatttgactttctggtttcttaagcatatacactcaagctcattgagacatgatatccttggctgaccaattcaatgcatattgacattgatagatagcttaaaaattgggggagaggacagaaataaatatccagggaagaccatatgtacctccttccatatatttcataaatatgctgttaactaaatttttagagtggctggcaatggtccatttccacttttgtatacctgtttctaagacgcatggtaaaatatcaaaagtctaagcaaatagtctttacaactctaccctttatgaaacctgtcttcagttcttacatttagtatattattaccacaattattattaccattattttatctctcatccaaacctgttcttgaattcagagtacttacaacaatgcctggatattatcttgaaagatatatttctcctgagtcaacaagtttaaaagtatgaagaagagcaaatcaaaacaaatagagcgaacagtttataaacagcatatacttgtgaattttattttttagaagttcaactagatctccagtgactatcccttgaagttattttcagcacttgttttttgcagatgtaaaatattttttcatatcaatgcaaaaatgacttctttttattgatggttagatttctaatgaggctgatctacagcaaaagacctggattgtcagtcctagccttttaactaatagtgacaaaatagatattcttgttctattgcattggggaattcctttgatcttagtagggatccagggataataagaggtgttctagagaaaaatatcagtcccagcaagttaaaaatattatccattttgctcacatcatcaccaatccaaggaataactagagccctggaggagttatagaagattctagcagcttatctaccaaagcttttcctcttcaggggtggtggtgttttatatatagaacaaattatcctgggatattggcaggctttaaataatattttaggtgaggctcgagattggatgcttccagaaaagaatcattctgagcaaacttggttcttagctccaatctacctcatgaggctgtgagaggtctgtaatgcactccagaagaaattttagacgctgattgttccatcccacttgtttcacccagacccacccttcacaaatgagagaaagtttcaagcagctgattttagaataagaaatttcaactaggggtctcggggagagatgttttatccattcataattaaggcacttgggccatatgtttttctttccactttgtcacctcctctctctttctgtgtggttttctctgattgttactttctttgttgttgttgttgctgtcttctgtctctagttagtggcagcagctagaaaagctccccacccatgtgggagcctttttctccaccgagagctttggataaaggtccaccttgctcttccaacttgcaggatacctgctggtctaacaagatagactgttcctactcaaacaccccaattgccccagctgcaattcatatccattcttttatctgtgaagttatctactagtgtctacattggttggccttaaagtcttatatgcaacttttaatcagagcagttcagctctctttgctctcctcctaatcactgccctttggtgcctcttttttcttgttgactttcctattgtctcaatcaaggtggtgaggagggggctttgatctggcaagataatcctagacctattctaggttttacttcaatagttgtacagatcatttttttcttttgtaaattaatcataaattcccttcttcaattttggcatgggctcacctgaatgaaatactataaacttcacctactttttttcttttaaaatgtaacaaaagactttttacaataaattactatagataataaaaagaaaagcacagttaacaagaagggatccccaagcacaataattaattttttttctcttgctgggtgatgagaaagtgaaaatttttaggtgtgactagctttggaccctgaataagtctgtcttatctgtgtcccatttttccactttataatcttagtgattggtgatggtcgtctcaaagatctcttccagtcctaacacgataatggaattctagattttaagtgtgttcatttatttgaatttatctcaaaaggtgaggtcatatagatatttcaatataaacattttgctgtgactgatagcagcgacttttaaaatgcctgtaaacatttccactgatcaggtgatccccatagtgaaaaacaaaatccaccgaattggaaaggtaggggaagtcagtgctctccctatcctaggagtctcatagtctcattagcagagaggtgatgagtggatatttggctgatgatgccaaacatcattacacttagtggagttaacttgtcagggcttagtataagggaagtagaggaatgaatctgcaatctgttatgtttatacagtgtattcattcacggcgaggtgtattcctcagaatttagctgattactaggctgacttccaggttgcatgcctaatgccgggggcccgacccctgtcaatgctggaaatgatttgggatgtacgttttcaggtatcatattcaatgaataactgcatatgcagatccaggagctactacaatgtcctcattccataatggaaaacccctgctcccaaatgggcagggaaggaccaggacttgggagagcagggttctgagcattatctgaggactggtggtgacagacgccaggcacacactccctccgggtcattgctcttcctctgctagatgtagacaagcttcattctctccttctcttccattacctctgcctcttgtcttgtcactgacccaaagtcacaaccagaattttaagcctactagaaaatgggggaaaaggcaaatgaaaccttctctttctagtctcttatttctttatctagaaacaaactttaaagattgctcctcttcttagcaggtaaggagacggaatacctcccaacagctagtctgatggtgaatgcataagcctatcaggaagggagaacgaaaggatttgtccctgggttctcagaaaaattggctttgtaattcttagaagcatgataaaaggacattaaatcgactttgaaagctgtggaagaaaagttatgattcttcttcattgatgttttatcaaaacagaagtctaaaacttacccccactgcatttaagtgtcctgtgccccccaaacatttcaggtacatgaaaaaagccctggtgttcagcaggatcatattaaaatttgtttcttgggggctactgtgtgtttctaatccgaggagtgctgcctgacaaagaagagatgctccataaatttttgctaaatgttcactgaaagatttgaacctcctcctaataggtgctgattaaccagcaaacaaatgacatgcacagaatctgacacgaggaacttacagcatgagagaagggaacccgatatggattgtctgaaaatgatgcagaaatcttatgcaaacgataaaataaagccaaacaaaatacacaggcatcttttctagtaaaccattttaatgtaaaaagtacctgcttattactacaaaaaggccactttttccaagtacatctcgtatttgataatacaaaaaagccattgtttccctaatgattttattatggttttccttaaagggttaacttgtagcatccatgctgtatggaaacggaaggctgtatattctttctggcatatgctttccaattagttggatgtctgatgagctgcatgtaatcttaataatgctcagatttgatataagccattttagtagataatggctctttgaaggtaagtgaaagggataataactcttggcaatatggttgttcaggaaatttcaattttttcataggaaactgaaaatacttagaggattaaagtgactacaacgcacagatgaaatcccccatttggaagctggcttttctcacagtttctccatgttgactgttttaacaatcgccccacttagctatgaaatcttcatactacagagtgtaacattgtttaaaagatactttagcctcataaatcaagtgctgagataatgcattatgtgtgatactctcctaggagtactcacaagcactctggtgaatactaactcctggccaagtgtttttttcaaatattattctcctttacttctatgtcaggatcccagggccctgccatcccagccaataacaccacaaacggagacaaggataaatgatgcaaagactgaacacgtgtgctgtttgcagcacggtaattgccacactgcagattcttaaccctgcttgggctcaacattcaatggaacagagaatcacttgtgatttcccagaatttcagaatattttcatttcttaccttgtgtaataccagtagttgtttgtatccaatgagaaacataaatctcaggacttgtacctgaaatagaatcatggatccttagcttgggaggattttaaagatgatctaagaatgtggtatgtaaatgttaatgtccattataaattcatgtggaccatatttaattacagaggcttgaccttcatgctcaaaactattaaatatttccatgatgggcactgttgtagatttgaagagactaattgcatttattttataattatcctccatgttctggcttatctgttttttcttgagttaggtcattttttcagttggtgtttcctttgcatactggtttcttcaacagagtattttggcatatcaggtaacacttgctaacaatggtttgattgatcaatatcaggaattgaagtaggtacacttaaaaatgtaaaaaaaatgtactctgtactctggggtcattacaaggtctcaggctctgtagagaggcaagtgggatggaggggagagaggtagggagccggtggggagcaaattgggctttcccttagggtggatggagagcttgccttatgagacattggggaagagtcctcttgtccttctcgtgacagaacattgtctgaattactgcttctcttctttcagccccagcataactttgaaatttctactgaaaagatccccaatttcattcagaaagaccatctttcagctttttccaggggacaaatgccttagtccttagctaccttggggaccagactgccccagtgtcctccaaagtccccactgctccttatcaagttctgcttttgaagctttaatatcagcttaagatgaaattctgatgagatctttcactgtgtaaaaaaaaaaaaagaattctgtctaagccggtgttgtactgtgagttcctcatcacttttggctctaaactgcttcggactttctgaacatccttcattatcgcagtttttcattgctgccttaaaatgtattccttttcttttcttacgagattttgggaaggaggagagagaaatgtgtataatagttgccttaaatgtgaaactgccaactgaacttgatatacgattgtccctttactcagaataatttttgatacaataggaattccctactgcggtctgcaattcgatagcactggtgattatatagtttgaattaaatgctagccccttctgatacaatagtctacatctacgaattactaagcttcaactcaattcctaggtgctcctcaacccaggctaacttatgtgcactttcaaggtacctgacctttctatgtattgtaggagtgaatttgggacgggtgccatacacttagaactcacccagcagtagttatccaaacatctggtacagaaaagtcacatgttaaatagctgttaatgtcataaagactccagtaaaaggatgagatggaagaattacaatattttggctttggcaaggatgtcagaaaagtttcattctgaatctaccttaatgtacctttagttttacagtgtctattggcctctttcattgagcagaataaaattatctggtaaattatgtattagaaaagtctctcaaacttctgaagttcttttaactcacatagaagaagaagcagaatacagtaagagaaacatactatacaatataataatatagattatatagatttagtaatatagtatgctgtaacttactatattatactataatatatagtaatatgtaaatagtatattatagcaatataaaataatatgataatttagaaaataataatagaaaaatagtgtggaaatgccaagtctacattaaaaaaatcttgatatcttaaagctaactgtaattgctaattttaatcttttgagccttaatttgtaatatagtatgtgagtgtgtgtgcctgtgtgtgtgtttttgtgtagtgtgtgtgtgtattttcttccttactctgaatctttaaattatggaaaggaagcctacttcttcttgtacttttttttttagacacagtctcactctgtcacccaggctggagtgcagctgcaggatctcagatcactattaccccgcctccccagttgaggagatcctcccacctcagactccctagtagttaggactacaggtgcacaccagcttggctaattttttgtatttttagtagagatacagtttcaccttgttgcccaggctagtcttgaactcctgggctcaagcaagcaatccatctgcttcagcctcccaaagtgctgggattacaggcgtgagccaccgcacctgtcctggaaaggaagcctttttatatgagttgttttctacacagtaagtacagaacaacgtctatgaccatgactgtataatatttctattaattcctgtaacttaaaacatgtagtttgtaacatgacgagaccaaggagtgccacaaaaacatgagatgcatgtggttaaatccatttcatggtgctagttcctagccattcacttacaggtgggggtgaccattctttggcatttgaatgactcattttctctccttcagttgcacttagttggacatcaagaacttcttgtacttatgtttcttagaacaacattgttctttttataatttctttaatagtggcatggagctccctctgtaacctaatgttctttctctcaatgattctccatccctttgtctttggaactatagcatttttgtcttggtaaaatagaggtgtgagggttcgacagtcaccagcctcatgcacagtgccatgaatgtcattgtcattcaggagacatgctttgacttctgggcatttataaatccatgcactgcaataacagcccataaaaagtggctggctaatttccaaagagtaaaaggaagctcaggttaaaaaggaaatatggttcatgtcccaccagagtcaccaaaaaagagaaaaaataaagaaggaaggaaagaaggaaggaaggagggagggagggagagagagggagacaaagagaagagaagagaagagaagagaagagaagagaaaagaagagaaaagaaaagaagagagatgtggtctttgcaatctggggtctggatagatgtaaatgctggcatttgtatctacacctcgtgatgctggatgaagagaataatagtactaaactctcatcactctgggtgactggtaaattgtttagatgactcctaaattggtcttgagctttagatggaaactggctttcagtggagtttaacatgggacttccaaagatcttgcaaatgaagactccctcatctggtaagttaattagggaattaaccaccttaattttaaccaattagtttaggaggatagaatagacttgtaatcaatgcgagaaatgagctctaaatgaatgacatggtcaaaacaactctcaaaacaacacacaaactttccacttcccatgtcagtaactcaaaaatggcctgctctgaagtctctttctggactccctgcatcaaatgcaagaggtggtttgtggtgactcataaaaggataactaccttattgataaatacaagaccagcctcagaaattcatcatgatctcaatcattgtcattattccagcgtctgatagttagtagagtgtaggctatgactaactgaagactgtaagaacttctatcatccaggaaacttgggaaaggtaaaaatagtatctaaatgccaaatctaaatgctgagatggtaaagtctgaaacatttgagcacatacacaacatggccatgtaataataaatctgaatattattctgactgagaaggtgccaatgtaattttctggattactcttgttggatgtatgagtattttggctgtgttttattaaatctttgaatactttagatacttctgaaggattagatgagaaaggtttcatcatgctctatcaacaattaaatatattaataaaagtaagaaagtgccatttagtaatcacaaagtgtgtgtcattccagcaaagtgaacagtggcgaaagggagtgtcatatgattaaaaaaaaaaatgtgtgccttgctgaggcataacatatccccaacttgcaggattatcgctagaaaatggtatgtccctagacttctcacttctcctcctaatgccagcatgttctttttggtgacttctttgcaacatgctatgagactaaaataatttaacatctgacttcaatggatatgagacatttggagtattttttaccattttactcattcataatagagatgggagagatgagggcaactagaaagtaagttcccagacatgaataataggttatttattgattgtttttgtaggttatttttgatatttttgctctgtgggcaaaatagaaaccaacaaggtcagtgattcacatcctctgctgtcagctgccacttggtcacttttggcagtattcatatacatgtagacacatctcttcagctccttcatggctttctatagggaagtccttgatgtactatctctcaggcaatatttaaaagaaaaaaataataaaatcacagacgatgtaccactaggggcacattgactccaagaaaaagccacgtgagtaaattggtattccccttcactctctccaggttcaatggtgagaactgcacatttaaatgaaaatgagcatgtgccttcctctccctcctgttcttagacaactagataacactccatgaaggcctgtcattcaagaggacagtcagtttggagatgctacttgcattgtgatagtggcgtttgctcaaaagcagataatgggtctgcttttgagacagcggggctgtgggtggtctatgttccctctgttttaaaatcttatcactgtcagcccgactgagataaagttcacgcccagctttttgaagttgtgaacaaggaatcatttgttggaaagatttctggagtattttatgcgcattgtcactcaaaacctggtcctacaactcaaaaggctacattagaccaggacagaaagaaatgacagacacttttttagcttctttcacttaactttaaagaaactttaaaaaagttatttaagtttcaagagctaacttttgatgacttagaaggctacacaagttagttcaaggtctcagaggttttatagatgatctgtgtaatttcctacttaatttgtaaactcatgtgattttgaatgtatagaagcaaaatatttccaattccaatagatttatggaaagttgaatgtgaatgtttatacatgtatgcatatttatataaagattaagaccaagtacgttttctaaaacaattaattctgaaacattacgttttgaattgtaaagcaacctgaaagttattcatgaatgtgttctgaaagctttgttggatgtaaggtgtttgatatggttttataatggagatgttcaatggataataaaagaaatacagataaagccatcgagaatcatttctgaagagtaggtaatttaacattataaggtgacaattctccgaaatttttggaataatgaacagaagtgtaaaattatctttaggattggatggtaaattacgtattgtctattggggcaaaatatatttattagcatttgtgaggaaagtatgacttgaagaaagtaaatagaatttaaatctttgtttctggacaatactttacaatgttttcttagaaattctcaagaaaccttgcccacatgagaaactgaatgtcagaatttcctcacatgccaccagtagattgctcaaaattctactaagaagacatttgggattgtattctcaggtccaaatataaatattataacagattatgtagtgtccctgcttaaaagactaaaggcaactcatatggcttggttctttgataggaaattggaagcaaactatatagtgaacatacattttgattttttatatagtattcacataaaccataatttctacttcttttgtttaatttcagaagaactggatatccattttatttacattagtggagatatgtgagggaattaataaaggacccaagagttttggggaattgctgcaaagtgccagacactctggaagctcctttcctatataaaatttgtaatttaatgttttctataattatatgcagtttatagatgagaaaactgtcctttaagtggtctttccaagttcatataacctaattaatagcaatactaagattcaaagctaagactaatcctgggcctgcacacttatacaaaataactctgtaaggtccaaaacttttatatcaattttgcactatttccttaatgtaagcatctgtatatctgccaaccttctcaacatgttattagccacttgactttgcatgaagagataggagatcagaaaaataaatttttagagagacgcttgatacccttttggacatagtagatacccttttggacatagtagaaaatgcatcaatagtaatatctgtgattattatggctactgtcatttcaagtagagggtaaagagcaggttggctcaacttctttaccctatgtagctctggtgaacatcattccacaaagtttgtagtaaaatgatgacttaaggtatcttactgctaataggttttgaaggaataaaattgtaaactacatttgaaatatgtgctttggataagaagaggccaaaaactgaagttttgcagttatatgtagaaatttgaaattggatgtagattaatgtgtgagttatacagccgtccaaagccagcataatcctagttgaaaaataaaattaaatatacagtacttgtattaaattggtatttttcaagaaacatcactcctaaaatcatttagacctatcagatatttaaaatgcagtgcttagcactgaattttctgtcttttcagggttagctaggtcagaagattctatgtgttttcttatcacttaaatctatccatagttggcaagaattactgcagtttcaataagtcataattgtcaaaactttgggataataattaaattggcataatcaatttatgtcactttgcgtgagaggtttacaaagcctctcagccttcaaagacgttgcttcctgatatggtttggctatgtccccaccaaatctcatcttgagttgtagttcccataatcccaatgtgttgtgggagggacccagtgtgaggtaattgaatcaaggactcggttaccaccatgctgttctcgtggtagtgagttctcatgagatccaatggttttataagggacttttccccctttgcttggcacttctcttgcctgccgccacgtgtgatgtgcctgttttgccttctgccatgattgtaagcttcctgaggcctccccagccatgtgcaactgtgagtcaattaaacctcttttctttataaattacccaatctctggtatgtcttcatagcagcgtgaaaatggactaatacagttcccatttccatcccaggacaagcagtataacaatgactattgatgtgaattcagagcctggtgctggaatgcctgtgctattcaggtagattcagaggctggtgctagaagccctgtgctgttcaggtgtgtgtcacatctggtgtatacttcctgaccaaggtttacttatctgaatctcaacaataccaaaatgcttcccttggcacccagccgcaatctcgcatacagattctcttcttgagaactgtttatcattgtcatcatgtaaacgtagaagggcaaggtcatgcatggacagtcaagtgctctgaaacatactttggaaataatgtaattgtcactttacagccttttgactaactataaaaacaaaataaaacaaaccaaaaaattgaattaaaaaccacagcttttaatttttttttcccttctgtgttcctccttttgtttctaagtgtaataaagcaaagagttaatgtgcaagaaacagctcaaacaaagtcacaggtctttaaaatgtggttctagtttctcaaaggtcaaggctgccagatttatgctacaggtattttgggcagttattagctttctatttatgaaccaccagtgggccatgtctgtaatttgacatccattattttcttttttttcttttttcttttcttttttttttttttttttttgaaatggagtgttgctatgtcacccaggctggagtgcagtggcgcgatctcagctcactgcaacctccgcctccgggttcaagcgattcttctgcctcagcctcccgagtagttgggattacaggcacatgccactatgcccacctaatttttgtatatttagtagagatggggtttcaccatgttggccaggatggtgttgatctcttgacctcatgatccgtccgccttggcctcccaaagtgctgggattataggtgtgagccaccttgcccggccccattattttctttttgaacatttgagagcaaattattgctaacacaacagacacacatacacagtaagtcttcacttaacatccttgacaggtgtttgcaaacttccacttgtagtaaaagaaattataatgaaaacaattttaccacaggctaattgatataaacaagagttaacttcctatggcatatttctggtcacaaaaacattaccaaacatctaaatgatgtcccaaaacacttctaatattaaacattgaaatacatgttagctgtatatacatgtaagaaagattaataaaaacaagtaaaataattatttacctatattttgtagttcagggtcatgggtggccagagcctaaggtagaaagcagccccgagcaggatgccattccattgcagcattcactcacacacccatactcacatagactgggaccatttagacacaccaattcacctaatttgcacatctttgagctgtgggaagaaaccagaggagctggagcaaatccacgaagacacagggagagtgtgcaaatgccacagagatagtggccccacctggaaatcatttttttcactcatcaatgttataacaaaatgacattgaacaacatgatgttattcgaggacatgctatcttagtgtgcatacacacacacacacacacacacttgcactatacatttgtgatgtctaatgcagtagccattagccacatgtgaatattgagcacttgaaatactattagtctaacttccatgtgctgtaagtacataccacatttccaagatttagcatgaaaacataatgtaaaatatttcattataaatttgcatattgattccatgttgaaataattgtattgtgtacagactgggttcaatatattattgaaattatttttactttttaaaaaaattttaatgactactagaaaatgcagatttacatatgtagttcaccttatgtttctactagacaacgttgttctagagagtttgccacatggccaggcaaccaataaagcatttggaaacacgtagttttacagggtggcagagcaccttctcatccacaaagtctgtgaggctcaagatctctcaagaccatggatccataactggttctcttggatacatttataaatttatgtcacataactggttcctatgtcatgccccctctgctcaatgctcatcaactctatgtgaagaccattttccatttttcacaagttatggacagagggagtggcattgtggtttccttcctgctcaacataatgtcatttaaaggaatgtatggggagatgaatttccttgtgtcttgtgacaactgccaatcttttatttgaaaatttaaaacagccacacaaatcatgtctgtttttatcctaagaagaatataccattcttatttgaaatatgttatgtgatgtgaaatcctgtagaaatacaaaccggtaaacaccaagagaaaagctccatgagtgcaatttggtaacttttctactgtcagttggtaaaattggcagaatagattaggtagaaaagaaccaaagcagtcctccttaaaccataaaactttgaatgccccttccactcatctgctcatgtatgacattttatgtaatcaatagtcaactttgttagtgaaataaaatatatcctgcatacattgacttatttccaccgccaagtttcctgtacaagttgccacctttacttgcctatatcactgtaagagcctcctcttctatttcaccacatgctccttcagcacattctggaaaagaaacctgagtgattttgtaatattctaaatcacatcatgtatttcccaaataaaaaccttccagttcttcaccattgaacttgaatcaaagcctttacttaagctgacaaggctgtgcaaaatcctgcccttgcctctctccctcacttcacgtggtgccatttctcctttcttactaggcatgaacccacactggcatgctttttattcccagaatatacccagcacattcctgcctttaagcctttgcacttactattttcttcaccagtcgtctttccccagccgttcccatggctcacagcttcttatcatttaggtctcagcttaaacgttgcctcccaagagaggccttctatgaccacccatccatagcagtcatcaagtcactttctggcccaacactctgttcctaatagtgcatactattaaatgattttatcctgttggtttgtcatttttttgtttactgtctattcctcacaacccttgcaaactccaacccacttgaaggaacaccccgagtgttctgtcttattctctagcacagtgccagcaaatacaagagtgcctgggtctataacacgccccacgtaattatctgtgaattaataaaaacagaagtagcaattgtattgatatagttttgacttgctttcacatccacaagtttctctgagtagtttgaagacatcatgcttcaacatcttccatctcttcatcacaacctggtgagctttttcttagaggagacctcatgccaaaaaattaaaaatgtgcaacgaatttgtgcagtgccaaatgtctaacttgaggaagggtgatgcacaggttagaggaggatgaagactttggtttaatccgaactttcactctccattagacatgctcagtatctgtgtttctatagtaaccctggccctatctgcctgggacttacagtctctacaaatatgagtcaagatcactaacaagttatgttctagtcttttagtctgagtttaaatgattgtgagctgggcaagcctccaaccttcttggcttgtcccacaaacttaaccagcacccctgcctctgcttgctattaaatggcaaatttttggctgggcgtggtggcttatgcctgtaatcccagcactttgggaggcagaggcgggtggatcacgaggtcaagagatcaagaccatcctggccaacatgatgaaaccccacctctactaaaaacacaaaaaattagctgggcatgatggcgcatgcctgtagtcccagctgcttgggaggctgaggcaggagaattgcttgaacctggaaggcagaggttgcagtgagctgagatagcgccactgcactccagcctggcgacagagcgagactctgtctcaaaaaaaaaaaaaaaaaaaggcaaacagtcaaatgtatactaaactcatagcacccaggtgaataagcaatgaattcatgtttattccctcttctactctgaccatgcatgttttctagtaagttctgaatgcttttcttgcccactcaattctaagggggaaaaaattggaaattaagcaggcaggtttgtctttgatcaaagaaatgcttcatttgacataaacactttaagtgaaagtatattcaaagtatatatatatatctaaaataaataaatatatattatatatataaccacttctattagtctacccaattaacagtaaatgcatttcatcattttgaaagaatttccttagaattttgttttgttttgttttttgcagaagagggacttctgtacttttaatggctgtcttcttttgtacattcaatgaatacaaatttagagatgtaatgcttgtgtcagtctctttgggcacgtggaaatagaaaacagaaaataaacaagttgacaaaactgtgcaattcaatcaactctatttgcatagtcttatttgaacttagttttatatatacatatataaaatatataatgtagtattttaattttaattttgaattcttgttctactattcatgaaagtatctttattctatttctacaggatcgttttctccacaaattaacaaatcttctttccaaacatgccctgcctgtggcatttcagtgaattcacaaagcaaacttctgatttacagagagtggctgctcataaaatcttaagtaaaaagaagtctcataaatacaaatgaggctggttttttttttcagattactaaaaagatagcaaagaggagaagcatgtagttttatccagattcctagatggagacagtgaataagttttctaagaagaggaacaagatttttagcttcagaatgtaacccaagtttagcaacatcacttttcttaaaatgtagggaatgttaaaaaagtatcttgttctaggcaacatgttgattacgcatgaagaaaactggcttatttatagaccttgaaatgtttggtacacctgaggaattcaactacctctcaattaagataaaacaaagtttacaaaaataaagatttgactgagggaaaaagagacatactcttaaacgtacccgtcctttaactgtcttctaaggaatttttgttttgtttaggttttaatgtccaccaacagtggagttggcttcccggctgtgaatagattcatggaagatgaacaaaaacaaatgaacaaatcaatgacaacaacagcaacatctgtgcatactatagaagcagatgtgtaattattttgtacattggcttaatactgagaaagagactgaataattattgcacttctggcaagtctatatatactgtctcctgacgaaggaccctccagcaacttcgggctgaaatgaagcagattcactcaatccgcacaaactctcagaaaagtgcatctggaaaaaaaaaaaaaaagtgacagggactgagtcccagagatattccccaggaactctccccaatctgtggtgcaatatgtggtctgacacagctggacaccaggcagcacttggccaccagcccttctggctggactcctccccaaggtagggtttaccctcacataaaattgccaaccagggcccacttgggtatagaactaatttagcctcctgtacacttgatgaatgaagaatttcctctggggactaaattatagggcttgttggagttgctctttcgtgatctgttatttggaggtaattttccaaaagggctggaacacatggccatgagctagaataggattcaccatgaacagctgccacgcgctggccggcacatcccagtgcccttgtcctctcccccagcctcccctgccactacccctgcttcccgagagaggaggtccagacaacagggctggacttaacgttagatctttactttccttcttaattaaaccactagaatggaatctgcccacctttttctgcacccaggtttccagaaatgtaacatcttgtcgtaacacgtttcaaaacagatgacaggccttcccctcatcctccaatgtggctgattacaagcttctgtcaaattccaccaacccccaccaacccaccccagttggctggaagataagcttctgatcttcccttggctttttgaactgttggaagctgtgtaaacacaagctgcaggttagtcagattctatttgacccacggcctgctgagtgcaaagagattacatttgaacactcccttgtctaattaagcaatggtgacctattgcggggtgcttgctgatgaggtcaaatagcaagggtttttaggctgacctgttgcagctggtcatttgctgataaataagaaacagctagtttttagtgagccaacttcccgacagagccttcctttcataaagcactctaatttggttatttctctgaatttcttaagtgagtttcagtactttagaaaaatttttagtactgagagtaacagacatttgtcctatgatggaaacccttcttcgcacagcagtgccccttcaaaggatctacaaactgttatgctgtgcctctagatctttttagaccaccaacttcttcaaaattgtgaaagatgaaggtcattttgaatgttgacatttggatgggatatgatggtgatagtgggacaggaagccccaagaaatagatctcaagaccttgacctagctacataatcagaatcatttattgagcatctgctctgtagtagacgctgttgtaggatcttttaatctttatctccactccttaccatgatcgtcacagcaagtgccattatccttgtttcattgctaagattcctgaagcataaagaggtcagaaactttcacaaaggcttgcagtcatgaagcggaaggtctgggagctgatccataattcccatggctttacgggttgttcatttcaggaagctgcccaatttccttgtggaagaagtgtctgaaggccacctatggggagcaaaatttgacggatgaagattttatctgtgaataagaaataaaataagaaagtgatatcttcactttgtatctaaaatgttggaactgtagacattgaaaaagttatcaatgaagccctcgtattcaccaccatgtccctacataggttatccctaaacctctgtagagggtatctgttttttctgccatcagtctatttcctgaaattctggaaaaaaagtgtacacagaattcctgcctcgtccaaaattcagcacgtgtgttctgacagacgcagagtccccagatgcctggccactgtgaatacctttgagccaatcagaatcaaatacgtgtgtatggaaagttctgccacagacacgattgccctttctcttggcctttagttgggaatcacaggctggaactactcctgtcatcttgccacctaccatatgtagccatacggatgtatctgagagctagaaactgggtcctggtgatgttggaatcctgatgaagctgtgcctaatctcccttgcagtttacttagaatttgagaatgttttagatattttcaaatgaaaatgcctgagtttaagtattattatcttgccagatccatgcacccagccaatgatgagattagagtataacaacatctccgtgtctccaaagccattgcttttccgtggaaccatactgttatctgagttagaaagagggctttgggaaggagaggacacacatttttatcaatgtgttttttttttttttcctgtgtgagaaagaatggagtaggacaactctagaattacatctcttgggaaatcttttaacatgacccacaattccttttttaaccttcttacaggttcatcatatcaaaatttacaaatatgtctgtcaatctcccacaaggaaatgacacaagctctctaatgaaaacattttctgatgccttggaattttagttttagaccattctgcacaatgtctcacatacatttatctggctacattttcagtcagggctgtattttcagcctcagatgtgaaacatttttcgtaccccttaaaaactgtagcaaggtcacaaaactcatgaatttattgtaataataaaaaatgttttgccccctgtttttatcagcgggcctagtttctaacattacagacgtgaatttttgccctccttggaaattcttgccaatttctttgtcatccaccttcaattattggttcacaaactagatacaggactaacagaggccacatcacctctggatataaaagaaagttcatttccctttcatgttatacttcttttcagggtgagagaggaaatgtactaaaagtacttagctctcttagagatagctagtttttcaaccaaataataataataataataatcaaacaaaaccattttgtgtctattgggatctttggatgtttgatagcctcatatacatatccaacctaataaaaatttatcttatttgtacaggatttcagcatttacagaaaactttcacgaaatttatctcatttatttctcttttcaatcctatagtgttgatattgttattattcctattttagagattaatattaggagactcagggattaagtgatttgttcaaaacttttcaacctcttcagtggtaggactgtattttacactcaaatgttctgattagtgttcagacatttcatggttacaaatagcttattcggtacctggatagttttggagaggagaagtcgaagttagaatgcctccatgttgcttcttttctctaggttaaagtgagtggattttctaaatgtctgagaacagattgtagtgtttcctgtttatagtgatccctttggggaaccacagaaattctgattttcctgaccatttgtcctccatcaggcccagatgtttaaaggacgttatttttatgtgccaatgattgcagtatttgcatgtgcaaatcatgtaattacttaactacccaaattgtgcatgcaactaaacttaattatgaacttagaacattgccttaagcatctgaccctggaaaaattatggtggcagaaaatgagtgttagagtggaaatttcttgcaaggctgatttcgttgttgtcattgtttcatggaaatctatgttaagttgattaagttgctttctttacctcagttggaacatctgagaatgaaaacagtgcttgtactacctactttcactgggtcatgaggagaaaattgagaccatgcataaaagtgatttggaaaaaaattataaaacatgaaaaaaggtattctttttttttttttgagacaggatctcactctgttgcccaggctggagtgcaatgggatgaccactgcttactgcagcctcgacttcctgggcttaagtgattctcccacctcaaacacctgagtagctagaactatagattcacaccaccatgcccggctaatttaaaaaaaaatgtagagtcaaggtctggctatgttgccaaggctggtcttgaactcctgagctcaagagatcctcctgcctcagcctccaaatgtgttagaattacaggcatgagccacagtgcctggccaaaaaaggaaatattatttttgaatggcctcattaaactccatttttgaaatatgtagaaattaacattttatatgaatcttttgttcatctacccaaatactatacgtcatactacgataaaatttgaaaaataaaattgtaaaaaaaaaaggaatattattgttatttatctttaggctgcataacaatttctcatttccctcttctaacaatactatgtggcatatagagaaggaaaagttagctacatacagttcacatatatggaaactgaagctcagttcatttaaaggacttaacgttagttacatgagagtttaagaggcagattgataatttagcaccaggttgtgtgactccaatgtcaataacttagacattcctgataaagagaccatgttctttgccatcagtagttatagacatgtttgagtcagccactcaatgtatttaaaaatgtatactttccaataatttaaggaatgtaataccttgtcttgaattaacttgcagattacgattgcattctatgtaagaaaaggacttgctaagaaaactaatgatatacttaagaaggcggagcctcttaagacttacttaagagaacaaattcgatgggttgtgattgtactttacccatttgttgaaacagatacaaagggtacaggccagatccaattcagtgagcagttttagattaggttccttttccattgagataaaagtcacattactctccaagttttctattatttgcctaacctttccacccaattgcttattacagtgaagtcattattgtagtcattagagtattatcggataaaagcatgcatacatttacatagttcttccaataatatctcattgggtttccaagcctttgagcaactttgaaggttctaaagtgcttgaaagatggaaaggttttgcagtctctagatccaaatgatgttttgaaggtgattcaagagtatgtggcaagactggaatatttgtccttgagtctgactctacattctgatctctaaccacggggtgttgccctctccctctgtgagcacggatgtctccagacagaaaaaaaccagagatatcttggacattaaataagggtgtttcaaagaatatgggccactaagtcatctatacccaatgacttggcaggaagtagaatcatcacctccttttagagtcatgatatgtctgaaattgtgtttattctggtaaaataaacagtcattagcatgattcacactttttccagctttagcaaagaacagataaattatctactattatcctcctctaccttttacctcatttttgagaaatcaaatgtgtttatatgaatagctaccatttcttaagactttacctagtgcctgtcctcttgctaaacacaaatctatgccttatctaagcctccacaatagcccattatgagttaggcattattcttttcctatgtttacagataaggaagtggaggtttaagaggcttaagtaacttgcctaacctaacattgtttggcttttatttgtaagtacttctttcagttacctctgcactctgaaaatgcttcaatgatgactccaagacagacatgccaatgacaaacatactgatacttaaatagattttcttctgtctccatatgtgcatcagatgaagacatgaagctacaggttcagctcttattgaaaaattgcattcgtgccttgagtttctccattgaataatgtagcattgatatattaattaaaaataatttgtgacattttctcatcacctatgagatatcactttgaaggcacagttgtgataataaaaagaatgctttaaagtaaatttgaattccttaggaggtaagctttattttcaaatctttctgagtaagattatagcaagaggctgaagaaaacttctagcatagtgaggtgggtacactatggaagactttcttaaacatccagtgtccctgtcaattaattgtagatagtgtaagttcaatttgtctacagaatgaatttcatcttacttgacaagacaccaagttcttcttccttccctcatatttagaggttcttattagcttagatcagtgtaacagacacttacagtcacctgctaggctgcagctatgtgttggggactgaggatataaagctgatggaacagtccaacagggagagacataaacatagggggtagatggaatttcagagctagcactaagaaaaggctctcaggccagattctccagctggggccaggtaaaggaacttcatcctaaatctgtttcatataagcacctcgatttttctagtttggggtttctgcccttaatttttacataatagcttgttgatgcaaataaagaggcaaaggttcttcctcatttccctctgggatcaatggtggaaggttggtcgatgtgatgccagtgacctgtggtagtagcacaggggtcttgaccagctctaacatgctagtaaagtcctgacaagttcatcgttgaccagaaaaaataatctagagcaacagtagccactagccacagtcgcctattgaaaacctgaaaggaggctggcgtgagttgaaatttactgtcaatataaaatgcacattggagttcaaagacttaatatgaggaaataatgtaaaatttatatgtaacatttttatgctgaatacttcatgaaataataatatattggatacgttgttttaaataaaatatactcttgaatttaatctcatttgtttcttgctccttttcttaatgtgactattagaacatttaaaattacacaaatggctcatattatatttctactgaatagtgctggtctagagccttcctactctcattgatgtaacccttttctaagacatttgcttgggagagagaatttatcttttatgttaaatggcctcccaaatagcagagaaacattctgaaccaacactatttttctcttcctgtttctgtactgccatctaggttgttataaaacgttttaaatattatctattaaataccaacaaagtgtagaaattataaaagaaaaatatttagaaaaaatagcaaaagtgaatcttagaatttggaaaaatgttgttatgaaacaaaattagcagacaacttttttttttaaatgctcctttaactacaactttgtgaattgctcaaaaccgaattctgcttaaaattttcgtggtgttagcatctcttgaatgctgttggtttcaaagtagattaaactttaacaattatgattgaaggtttactattaaaaagtaatttccatcagggaacctatgctctggccctatgcattctccaatgcatcattcgctctgtttccttaaccattaaagcaaggggatagaataaacaatctctgtttgctttgatttaggcagtctctatttttttatgtgctataaaccacatttgttttaaaaatggataaatactataactggaataaaattttcaattttttattctgttactcttcaaaaaagatatctgactcaatattttcctttttcactgaagaaatatattattttttatctataaccaaggaaaagttgcgtaatttatattttgcaggatttgaaagagtaattttctttcttcccctattatctgacattgaatgttttccttgataagaaagagaggaatagcctatttactctaaaaatgttttcaaagctttttaaaagcagcacttaaaattggttgataaagcaaaactagagactattgtacaggtatatacaatgtataaataattaaaatgatgttaagtagggagacttattatttttattatgatcctaaatctgccatataaaaaaagacaacaaaaacaaacttttaccagcttaaaattgctatgggcatcacataatgaataataagtcagttactagaactatactttatatgtatttaatttcattcattttcagtattgtttttagtaataataataattttctaagatggtattaattagcacctttccattggcccactgtaaatgattaatatttcatgatctcatagttctttaataactaatatattagaaacactagtaattcaggtctataaagccaatgaaaggctgttagagttgtagttttgtttctcaaacttgccacttttaaaatgtagatattaaacctgtaattcagatgtctacatattatacttttatcatttatttcatatcatgtgacatagaggaaagtatattaaaataatagatcccctgtaaaatggtgactctttgtattcccaaatatgcaccaaagtattttttgaataaagacttgttaataatgtgacacattttgacagtttaaaataagagcttaatcaaaaaaaaattaaggtgacacctccaatgtttctaaaggtgttttctctttcaatgtggttaaatgctggaggaaatgctgctggcatattgttccagctgtcttgttctaacttgctgaaataaataaaaggactcataatagagtagatagagagatggggcctgggatgtttgtttaaaatttcagccatgtttgaattgtaagtgctgccaataatttcagccacttgactatgaaatgcttcatcctgctccccaagtgtctacgcacgctctgctcagctcaggttgctgacagggctttcgtgtatgttctgaaatgaactaactgaacatctgtctcaaagttctgagttatctgtataatttggagagttggcttggtgtatttggtcagattgaagtagctttgacaactaattgaaatagctttgacaacttggaaatattcggacaataaccacatgataaaaagagaataaagacttagagtgttaacctgagttatgactgaccagagcatggtaaacttattcaatatacaagaatgaggctcttagggatgagccttccaactaagtatcagagaacaactacgagagaattgcaaactaacttgtaaatgggtatatccacaggaaaatagtctcccagaataccatctcctccaccaaagtaagtgtatgactttcaaggcctgaagactccacaaggaaaagagattggttgactcaaacgcattattgacttgtcagttctggattggctggttgtagagaagcttggtgctggccaattgctgaacctcagactgtggttgtcagaagctgtgttgacctttgagatcattaaagttaagttcagatagttcagttgagtcacagaccacaaagcatggttaaccatcaggctgtttttctgctgattctggtccattttctgatatgagattgttctgatttcttcttctggagagaggaaccctcactgtttcataatctttcatctctctaggtgcagggtgaggaggcaggctcacagagatgtacttaaggcacagcagaagttttccatatccaggcaaagtaggagcttcttagagggttactgagaaataatgaggtaaagcggtagatgtcagtgatgaaaaggataagttgaggtaaaactcgtgcaaagagaaaatacaatgcgatcgattcctcttttacaatatcattatcatatgcacagttaggggagccctatctggtgatgagatggtctattattctggtctcactttggctcttgaactctcttctcaagttgtctacatctaatattgggacaatgagcacatctccactttaattggagtggtgtggaagcagtctagacacattcatttttaacctgaattattaaaacaaggcaattttctcaactgccttatctaatcccaggaaaatgtatccatactttcacgggccattttatttttggtctttgctgtttctttagatacagatgtattcatctatacaagctttcaggtggtagtgattatgctaatatattcacaaagcatagttctttttaatgaaaggtgaaaatgatgtgtaaggtctagtctgtgctctcaaggaatttaatatctattgagtggaaaggtaacacaaattataatatggtacttgtttttatagtggtgttatatataaaggaggtgaataataattttagctggcacagtaaaaatagaactctcatagaaaaatttgagtcgtatcttgaagtagaggttaggcaggtggagaaagacacaaaactctttcctggcagacgtaactggttctgcaacctcacagagatatggaacttaatacgatggccaaggaatagtgagcaggggcatgaggcctgagcagagtccgtggatgaggaaaatcctgcaagacaggaaaagaaggggaaagataaagctttaaataccaagctaaatattctgttttattgttgctcattattgtgttttgttttattattattattattattattaattatttttgcagtggagagccacagctaaattttgagaagagaagtgagtttctctgttttgcaggttatgtagatgccactattagcatagtgaaggatgaattagacaatagaaacccgattggaaagtaatcaccatagttcaggtaggagatgaggaaagcctggatttaaaaaacaccaacaactgctggtgataggaataatgggaggaaggaggctgatctgagaggaatcttggaaagagaacagacagaaattgatcatccagtgaacactggtggggaaaagacacaagataaaaggggaaatcaaggcagagttgctatttctagcagaggcctttgagaagttatattaagactctcttggttgatgatgtgagaatgacagaaaatacaactcagaagaaaaatatagtgtgttaggaggaataaaaataataaaaaagagtgtattggctcataactaaaaattccaggggtagaatgtggctgggatctaggcatccaaaacatgccaccattttctgagctctcctcacctcttggctttcttttcctttatgctggaattattctcaggctctatgtgatggtatcaaggcagacagtgactccagcccagcatcttcacagcaacaagtctagcaggaaggagagacctttgtactccttccttcaaaagtttaattaggccacccgcttagatctgaactcaccactgtggccagggacatcattctctgagagaaccccatgaaggagagaaggaactgtctagggaaaagttggagtcctgtttctaagagaatggaaaataaattttgactgagcaaaacactgcaactctcacttataatttgcaaaaccactaactaaggtagtgaatatagaaaggagaatagttcaggtgggtgcatgaagaaaggaggagcaagatgacaagaagggtttgtatttcttgctttgcatatcacaatattaaataatatcactttaatattaattaaagtgatattaataattatcactatagtgatttatagttaccattcagagcctcattctactaaaagcaggcaatagatagtattgagaatgtgtatttgtaagatatggcattttttgtattcttcaaaagattttggagtactcagggtgtgtacttctttattatccattataagtcagacaatgattttcagatgcattgtaacgatgtgcacatttaacacagttaggaatgtatgcaaattattactttaatctttatttcatgattttttttttgtccaaatgcttgaagattgtgccagataatagtttttcctttcattctttctttgtcattgttctagagatttcagttagacaatttatatagaaaaaccctgtctcagggccgggcatggtggctcacacctgtaatcccagcactttgggaggccaaggcaggaggatcacgaggtcaagagatcgagaccatcctggctaacatggtgaaaccctgtctctactaagaaatacaaaaaattagccgggtgtggtggcgggcacctgtagtcccagctacttgggaggctgaggcaggagaatggcatgaacctgggaggcagagcttgcagtgagcggagattgtgccactgcacacaggctgggcgacagagcgagattccgtctcaaaaaaaaaaaaaaaataaacaaaaagaaaaacactgtctcttggtacattttatgataaaagcattttatagaaactttcaattacatagaatatttgagaccatatattctaattaaataatcattttgctagtggataattcttccacgtgctatgcattagtataaacaaagggaatatgaatgtagaatgcacatattttacactaatcatgtgaaatatttatttattttaaaatactgcaataccaagtttctatcactatagaaatgagatattttgaaatagttataccatagtttaacatgtagaagttataagtcagtgagaatttgttagtactgaccttgtgttatagcctggcaagtgccattgattatcaatattatttattgcattatggtctaagcataattcttataccttaacagttctcatagaggatctacatttaaaaataaatgtagttctgaaatactcaagcaatgctaatggaaatctgatagttggattttatggacatatgacatagtaggaaaagcactgggctcagaaggtacaacttaattctaatactctcctgtttttagaaatgcaatgttggggaattctcacattcatagaaccccagttccttttcaataaaatagagagaattggacctctgagggacggtaaatatacagaagtgcttcggggggttatgtgggaaggggcaggtaagccagtggggagctactgcccagccgctgctggggattgcaaattgttaaagtaaaggaggaatgggatggaatcacagtttccttggaatgacatggaattgagtacagtaatacccatctctcatgattttcccatgcacaccttccccagggtccatttttaagaatgaggcattaagctgtatgtgaatgtacttggcaaatgggaaaaccctccatgaatgcattgttattattttgcagttcatctgagaaaaagctgccatttcctcatacaagatgaactgacagactttctctttttttccctcccaccaatccaaaaaacaagtctttatgttgttttcattagataatatttattgtacagaaacaggaaaaagcaggttaaacctatgagtaatgtctagttattacatgagaaagacacagttccctaaggggatatagagttttcagaatatgaagaaataatatttgtggtgaaagggaggaagagagagtgatagagagagatttttctagatacagtcatgtatatacactccctgtcaaaattctagacaggattctatttggcattcctgacaggatattgtcaggaatcaaagttagccataatgatggagaatttaattaaaattagggagtatgtttagcaaaaagaaataactgttgatccaatcattttagtcagtttagtaaaaaggtcagactggctggtatttagctttgggttgacacagtcaatcctctatgtaggtatttatagtaagcctggagggtttgatgaaatgtggaggtaattgaaaataaactatagtttgtggattctcaggagttttggaatctgttattctctctgtttagtatggtaatagttaagcatggcttcagtgattattacaaagttttcgaaacgaaagtatttcttctctatgaaaaaagaaaatcttttgaataatgcttactggctgtagatagattaacaaagttaatggagactttttttcaaaataagatactgacttttgataacacattttaaagaatactttgataaatatcaaaattaaccttcccagcagaattcattcacacattaattgaaataattttggtggaaatgaaaaggaaattgaataaatttggggtcttttaaacttttttacctatcagagtaactgatattttaaaaaatagtaatgttaaatgctgatgtggacactgaaatggaaacatattaccattagggagtatgatttggtaatgaacatcaaatgtttgcacgattttcttctcataaatttgccctaatacatagtttaaagatacaggtactcataaggacaaactaaaattcaatatcacaataggacagtgttttgttaaattagtcatattagttgacaaaataatatgcaacattaaaaattacattctgggacattatctaaagatgtgaaaataccttcacgaagtcaaattttcttcatacaaagtcaagtaacaaaacagcacttaagagtatcaaggtatggaatgtagaataaacagaaacacattgaaaatactggtggaaagagtgattatttctgggtaataattaaaaaaggaaattttattttcttgtttatattttattttactgcaacttctaagtttttcaaagtatatttgttactattgtaattacaaaatgaatagcataaacatttattctggggcacttaattttttacagctgtatgcctctggccttactctccacctcctctcagtttagcgctatatagtattttactcacatcccaaagggtctcccccacaaacacatccaaagaaagaaaaagggtgaaggaaggcaatatcaggcatcttcataacatactttactacttatctactccgctcttccttgtctatttttaatagtctgatttttttttgtcagctcttgcctctccttgatcaaatactgtgctcacgttttattctaagtccccaagtcctcacagattactgaaggtttaacccaaagtcccttaagataagagtacttctttcacaggattaaaagaaaaatcaccctaaataaatatctttgaatgttcttctcactcctccattttcccttaacccctcagaatttattactattctagatcttttgagaatgtatactctttcctactactttctaaccagctccacctgctggtgctaacctgtgtgtctttgtaatctgcacccttgcctcagataatgtgggagttttcctcaaaacatgacttctttttcatatttctgcatcacttagttcctggcatgagaggaagtggggttagatctgttttagaatattttcttttggtcttaaaattgtttaatttgagtcacatttaattgcttttaggcaaacggatgaacaatcctagaaaatggacctcacgagagtatgctgaggttagggtttgaggaataagctgccaataattaccttcctattaggtccctctaaggataaacttagcaggactccactgtttggagaacagaatattttatttgggaattcagcagacactgactcagattttgaattcttcgcactttttatgatgcttgacaagcaggtatgatcctacacctgctttgaaaaatataacttgaggtaagccggttatgttttagaagcttcctgttctttcttgaggtcaactgagaagttctggccatatttctgataacttctcgtctaggaatctcccagggtactttgtaagctaatgatcccccatacccactcctgaaagatctgaatcaacattaaaatatttttggcatattcttttggggccaagaaaaagaaaagcaaagcatagccagtgatatggtttggctctatgtccctacccaaatttcaccttgaattgtaataatccccacgtgtcaagggcaagaccaggtgtaggtaattgaatcatggtttcccccatgctgttctcatgacaatgagttagtctcatgaaatttgatgatttcataagcatctggcatttcccctgttggcactcattctctcttttgctaccctgtgaagagatgtcttcctccatgatcgtaagttttctgaggcctccccagccatgtggaactttgagtcaatgaagcctcttttctttataaattatccagtcttgagtattccttcacagcagcatgatgacagactcatacagtaaattggtcccaggagtgggtgctattatatggatagctgaaaatgtggaggcaactttggaattaagtaacagtgagaagttggaacagtttggagggcttagaagaaaacaggaaaatgtgggaaagtttggaactttctggagacttggagggctcagaagacaggaagatgtgggaaagtttgaaacttcctagagatttgttgaatgattttgaccaaaatgctgatattgatatggacaatgaagtccaggctgaggtggtctcaaatggagatgaggaacttgttgggaactggaataaaggttactcttgctatgctttaacaaagagactggtggcattctgcccctgccctagagatgtgtggaactttgaacttgagagagatgatttatggtatttggtggaaaaaaaatctgttttatttctgtttattttattttattttattttttgagatggagtcttgctctttggcccaggctggagtgcagtggtgcaatcttggctaatggcaacttctatctcccaggttcaagtaattctcctgcctcagttcccaagtagttgggaatacagatgtgcaccaccacacccggctaatttttgtatttttagtagagacagggtttcaccaatgttggccaggctggtcttgaactcctgacttcaggtgatccatctgcctcagcctcccaaagtactaggattacaggcatgaaccaccactcctggcctggtagaagaaattctagtggcaaagcattcaaaaggaagtagagcataaaagtttaaaaagtttacagcctggtgatggggtcaaaagaaaaatccattttttggagagtaattcaagcctgatgcagaaatttgcataggtaatgaggaggagaatgttaatcaccaagacaatggggaaaatgtctccagggcatgtcagagaccttcaaagtagcccctcccagcacaggttcagaggtctaggaggaaaaaatcattttcttggccttacccagggcccccctgctgtgtgcagcctagggacttggtgccctacgtcccagctgctccagctatggctaaaaagggccaacatacaactcaggccattgcttcagagggtgcaattccccaaccttggcagcttccatgtgatgttggtcctttgggtgtgcataagacagttgaggtttgggaaactttgtctagatttcagaggatgtatggaaatgcctggatgtccaggcagaagtttgtcacatgggtggaaccctcatggaaaacctctcctagggcagggtagaagagaaatgtgaggtccgagccccccaaacagagtccctactggggcactgcctagtggagctgtgagaagagggccaccatcatccaaactgcagaatggtagatctaccaacagcttgcatcatgcgccttgaaaagccacaggtactcaatgccagcccatgactgcagctgtgggcgggtgggtggggcatataccctgcaaggccacgtgggtggagctgcccaaaaccacaggagcccccttcttgcatcagtgtgacctggctgtgagacatggagtcaaaggagatctttttggaactttaagatttaatgactgccctgttgattttcggactttcatggggcctgtagcccctttgttttggccaatttctcccattaggagtggctgtatttacccaatgtctgtatccccattgtatctaggaagtaactaacttgcttttgattttacaggctcataggtagaaaggacttgccttgtctcagttgaggttttggacttggacttttgggtaaacgcttgaatgagttaagactttggggtctgtttgaaggacatgattgtgttttgaaatgtgaggacatgagatttggaaggggacagaggtggagtgatatggtttgactctgtatccccacccaaatcttatcttgacttataatcatccccatgtgtcaagggcaggaccaggttgaggtaattgaattatggagatggttttccccatgctgttcttgtgataatgagtgagtctcatgagatctgatggttttataagcacctggcatttaccttctggcactcattctctctcctgctgccctgtgaagaggtgccttccgtcatgattgtaagttttctgaggcctccccagccatgtgtaactatgagtcaattaaacctctttttttttctttataaattgccaagtcttgggtatttcttcatagcatcattagaatgggctaacacagtaaatgactgttttgaagggaacattgaaatttagtaaactggctgttgtttcttttaggagctcattgatactattcactcattcatttttaccatcctgttgctccatgcattgtaaaggcagtcattggcttttggcttgatactgttggctgtattagcttgtgccttgtgagataacaaagggaatgtgccaagaaattgggagaaagtctgtattttcccatgtttactctttgatcttacttttcatgttctcggctcttgaaggacaaagaagtttgttgtagtcaatccaaagcttccttcctgctcattttcccagagacttggcctcaaaaatttggtccagacataattttttggcatatggtagatttgttcagtgcccctcggtaaagacctttcagatacacaacacaaattcaactgttggttcactacagatttcaagatcataaatcatattgagtcatgtctactagcaattcattatcagccttttcttcatattccctctgcctagagttatccaggatttttttttttttttttttttttgaggcagagtctcactatgtcaccaggctggagtgcaatggcgtgatcacggctcactgcaacctccgcctcccaggttgaagcgattctcctgccacgtgggtgcatgccaccatgcccaactaatttttgtattttttgtagagacggggtttcaccatgttggccgggatggtcttgatctcttgacctcgtgatccgcccgctttggcctcccaaagtgctggcgtgagccaccgcacccggccgatcctggatttttaataagaatctctgcaattatgaatgcacgaaacatcagataacccaaatgtgaaggactgaaagtgtaacccttggctattggcatgatcttgtggctaattactatttcatatttaagctttagtatctagattttgtggattctgactctattatcacttggaatatttttataacaagacaggtcctatagcaattcctcataggcaggaattatttttgctctgttttccaaatatttgaagctgaattcatctttgctcatatgaagatgatgaaatgaaaagagaaacacaagaccaaattattatcaaagtcttcctaaccaatctgcagatctctctcatctttcctgatttattaatgaaaaaaagaggcagcttctggtggtggataaattcgttttaaatatccttgaatattcactaggaatgatactaataatcaactccaggtaacttaagactatgcatattatagacataaagctgatagggtatttctttatgtcttagtatgaggtaaaactccctgaaagtttcctaatatctttatgatttttttttttgctttgtctgatcattttgcacagtagaccctctcatgctgtcattctggatttcacatcttttcttcactgccacctgcttttctgttgaaaacaaatatttcctttaatctctcttgtgttcagagtactagtgtgtttgacactgccctctgcttttacatagtattatctaaaaatgtatttaggttttgattttctccaattaaattattttaaagttataatgtaattattttaagtttacaattttaaagtagaataactatagatcttatcatttatagggtttattctgtacttgctggagcgtacagttaccacatttcttgatctggaaagttatttatcgccatttaataacgatgcttttattttattgaaaatacacaactctattgcacatgaaaaatgtatttgagtggctgagaagttgtatgaaagctcaggattaaaaccagaaaaattcgcttcatatcccgactctgctgactgtgacctatatgcagtggtgagctgataaatgtttaacaaccagttctcaagcagaaatagtccttaatttgaagaatttgccaatttctatgtagtgtttctgaatccaccatgactaattttaagttgcaaactggaagttgctgaactaaaggtagcaacccacatgtagagatgtctttctccagcctgtgagagccaggtctagtataacatccacagacttttgggtataacacttagcttgcctgagtctcagttttctgctgtgtaacatagattgtgttaggataaaatagtctatgatgaagtcttgaaatacggtagctccaataaattgcttttctaaaattctccattaatgtaattactattgcaaagaaatattgtatagattaaataaatatattactttcataaaatctttgttgttgaatttttatctcaatgctaaacatgtttatctctgtaatattcagtttctagtatttcattctgaaataaactatgcctaaaatttgtaaaagttagaatttctgcaattatgaagccaaccccattactggagcagttttgtgctgcagtagcacttaaatgtttagcattaattatttacaattgcagctgagtttacaaccttccgtcttaatcacagagagggaagaagacgtgagaatcaaagttagatttagttgttttgtttttttctaccgacaaatttggaaaaaaaatgtaatatttctgaactctgctactgaggagatttgccttattgagtcataaagtatttgccaccgtctctaataagtattgttacatttgactttacatgagcttttaaatcttttacagaaagaatgcattctctcattatcttaactctttcagatgagctttctcaagttgagccatttgctttccttggtctttcctgcccagcagtgctggtgacatgagcatcctcttgctccaatgcacctttcttgacctgacttgactgctggctttgattcaattatttgacacttcttccccaaagaaaatgctggggtgataaaacagaggtgacaggagagtaggtaaaactggtcagcaataaatcaatcaaacaagtacttatccaacacttcctaagtagcagagactgtggtgtaaacccataaaatcctcagagagagagaggaaaggaaagaagccaagagcaatgaaatatggaagaaggaaatatttaagaagtggctcataggtgtaagattcaaaaataaacattaaaaatcaagaaaggcacaaaatatataaaatagtgcaaagaaaaaggcttacatatttatttccaatttagtcaaatatatgcaatattaacaatacccaaaggtagatgtcttgtctgtttaatactgtctttttatatttcataaggtactgtttcatcttccaaagctgattagaaatcctgctgcttcagtgtattctctgggtgcttctcatccattcaaaccttcatttagtgaaattccatgaaattttaatgaaataaatataatgacagcaggcatatttccccaccctaattttcccccaaactgacgtgttagaagatgacttcatggatatttatttgatgttagaggtatgggatttggattttgaaagtttatgttttttcttttcaccaaatatgaaaattaaaggaggcagatgacacaacagttaggaatcaagtgtcccaaggtaggtaggaatctttttacattttaacaaattgctcagtcctgcaaagctacaaatagtgttgtttgcatttcaagtttcttggagattgcttgacctcttaaactccataaaaagaaattatttctatatagagtccttaaaattcagagtctttgtttcatggtaaaaatttcagcctttattctatgccaagatgttgcttttcataagctggatagttgattattactatggttgtgcagctggtaaaatctgggagtatccagttggtttctgaatggtgttatcttatgtatctattgatctaccaatcatctacttctaatggatcattttattcaggtaaactcaaacctagctgattaaatgtattcattataatttacatagtgttaatgcttcataaaatctgaaacttattatgaatataatttgaatgttttcttacctttctcacatgctccagaggttctacttccgtgacctgattcgagctaaccagcagaatagaaagatatccaatgcctagctttggggatttacccaatatcttgcaaatatgtgtggacaatatatataaacagtgtgacatttgagtcagacagttaggggtccaaacagtaattcttcaacttactagtatatggtttgaaaacattactaaagctctctgtgcctgtttactcatcaataaaatgggattaataacatattttgcaggactgatttgaaaataaagatgagtaataaataatagtgattgcatctctttcctcagttcttgtaggttttataagaaattatttttcttgaaatttctttctttttctattaagaaggacaaatgggaaagaggttcccatggagtatagttgacataaggccatgtgagtgttgttagttctgtcttaaggctcttccagctgagattctaagacctggcagagcaaagctcaaataaacacagctgcttctgtgtccctccttaggtggtgtggctgcgtgtgtcagcctccctttataatgaacagaacacttttcaggtacatggcaaaggttttaagataaaagtagaaaatcaccagagttcttatatattccatagaacatttataggctggaaggttcagactcatgggcaaatggctccaagcacaagattgagaagatacttccatcccaaacagaggcaatgtaattatgaggaagcatctttaagaaatgctgttgtggttctccccttattaaacttcacgtctatgttccatcagtagacaggaaagaatatgatgatttgcaaacctacagagtgccaaaatctagcagtgatccttatggaggaatagaattttcacttattatgtgtattctttgatagttattttaaggcactttatttccatttataacactcctgcagtgcatagaccattatccttaatggggacattgagtaccataattcactgggtagctaagagatttgaactgattgcagagcccagcatcttttcattgaattatgctatattagtgcaacaggtgaatgcttaaggatctctacaattaaaccggtgtgggtatgaacagaacataaacaaatcacactgacttttgtcttaggtcagagtccctaggaacagagcttgagactggaattaggtgcgcatgatttactgagggagtgctctctggtgaatgctataaagctgtaagaaaagcagaaggcaggaaagacattaagcaaaaatggatgggtccaggttctcctcctgatcccacgggtagtcttgaagcttgaatagcactacagagatggtatcaatttgaagcaagaggctcaagttttgtaccctttgcatgaattgttagctgtgggctagcccccgggatgggggtggaggctggcctcctagtcaaggtagcttctgtttggttgagaacatttctgtcaaaagagttgctgtgaattggcatctgtggcctgtgtgtgccaacagtgacctctgcacattgtatgtgctgtacatctgtatccaaatcagaaaattagctgctgtttaacacattctttacaacataaagctactaacaaagctgtggtttcaagctgagtctccatgtcacaaggataaatcttaagatttacctgaggtccaccccggtgaaaaacaggacagtgaatggtcagtaacagagcacctactatgtcactctccagagtttaagtgacttaaatctcacaaccacctaccaatgcccataatttggccactttttgtgtgtgagtagtgtttgaaaaacaacaacaacaaacaaaacctcattttggtggcaacacctgacctgtacatatttaagtccatgtataaattttattttcttgaaattatgggaatatttaaatgtttgaagaaataattactaatcgagttgattagtgcatactgcccaaggtcctactagctgtgttatgtgatctacacaaaatgtactttttgacattataatatctagaattattatatacgattattatataattattataaagggttatatactacaaccctggccatagggtctacatggaaaaaaaatgtatccctgacccatgatatcaccatatgggtaagggaatggaggctcagaagctttggatgtcagacaggatctcttagaattcatctcttagaattcattcaatgaatactaattcattggtatgactaacttaatacaggaatttgttttataacatccaaccagactactgagcattttgtacacatccaaatatgtaaggcaggtcattttataatttaggggactccagcgtttagaaaatcctacataaaatcacaatctatctccttgtaaactctactgatggacccttgtcctggcactcagaaaattgtagactataagcgtttttttctcccatagtttaccctgcaaatatgtgcataagttgcaggtttcaaatcgttaggatttttcttctttacactcagtgtctccataacttttaccattctaattaaacttttctgggatattccttttacaaagggctcttcctgggcctgaggtattcagggattttagcatgaagtgcagagagggaagaaggaagggagtgggcagaggactggggaaaggacacattcttagagccctgtctctgttgaaaaccagcccttcccctccctggaatccaagagtaaattcagccacagcttgggtggggtgaatatcagatttggccctactggtaggtcacagaagtgggagaaatctacgtgttggtggttttgtggtttcatggagttcatctatttacagtagtagaattgcatgctcatgacctgaaaatactgggatcaaatccagcctcccaacagaagctaagaagaacctcagatcctcatcagtatattttagcacagttttttgtagtgactccaggttggattttggtcttttaaagtatgtacaagaatgtaagctccttgagtccagaaattttgtttatttactgcagtgctactagaaccttcaggggtgcctggtacatagtgagcattatgcaagttttcaacatacatatgagtgaataattgaaaggttggataatttaaattatttcaggcatcattttaaagtatactcatttggaatttgtctcatgttttcaacacttccagtgcccataattctgccatcttccagtttcccctaataacgatgctgttcatgggtcagaaactgtataatacccaggaatatattcttttttctgaaatgagaaatctgaactaatgcaaacagcctttctaatttttcagaggacagtgttgttgttattgttaatactcagagtcatcaaaacctacccagataaattttaagacaaagcaattgatgcaaagaaaaccagggaggattacttgtcagtgacatggtaacctaggacttgtctacatttaataacccagaaagccacaaaacacagggctgcaagaaaaataaacttacaaattgatttattatatctctgaaaaaataaattttctaaaacaaatcttgttcactagaaatttacccaaagacatatagaagatacagatgatctttttcagcttctctacctcctctttttctgataatattttatctttaatgttctttgaattttttctttgaactatttataaaggtttgataagtgtttccaattaggtcattttacaaaatagatgcttaagataagttttattaaaatatttctaataatgaagaaaaattaagttattagtaaggtgacccaccagaacataattgaaaccctttatgtaagaggtgaaagctactgttcattaatccctatattttaatatattaaaaaacttgtatgagacttctagctcaaaaaccagttgctttataacctgctgagtagattatagattatttcatctcttaaaatattttttctctcttgctatgatatatatgcatattatatgattatgtactaacctattgtgttaatatttgctgtttgtgtgccaaaaaatcattatctgctcccaaaactttgtgtgcttacataagagagtgcattagaaggactgtaaactgagaagttggagagaaagactttataattccagattaaatttcaaataactctgctaatcagatatctgctacctatctgtaataacactggagagaatattcccatttcctttaattgtgactatatgtttttgatacggaaacttgggctgtaatgtaaaaggagtctgagcttagactaacatttttagcttatagatgacaataaatgtctcctttcccttcactctttcagaatgaattaatagtaataataatttaaaacaaactttatacttcatgaaaaaaacatgttcatgtagaaaaatcgggaaatgcaaaaaagaagaaaattaccttaatcaccaattacctaaaaccaggtatatctactgttaatatatggatccctagtcttttcactctctttaaaaaatatgtcaaatctgtttgaaaaagaaaatatatgcataaatataaaatcatacaaaacattataaaatgaaatgttaaaatgctctttccttctgtcttcagctcacctcaatacttcctgttctgagttttctctaggattgcctttacacatatgaaatcatatatacttcttgtttgtcttttttaaactgcgtattttaatttcttactgaaaaatatgaggaaggtgttcatttgttttcacgcccactttccctttgcagcttttaatttttgcatccaccttcagttctagtgggattgagaaattacattaaattatcaaagtctttaaacctagaattcataaattattatatatctttaaattttattttgagattttattttgtaattattgaggatgatagttgagctctcaaggaagctagactttaatttctgctattttgaccatagttagtagggggtcttggaaagtcacatatattctctggctcttaggttgtttacttttgaaatgttaggtgtgaattaaaggtcccttgtggctctaaaattttactatttgtgagatgttatgaaaagaacagcttttattcagcttgttcagttgaaagacagtcatggagactgaagggttacctgtaacaccgaaagtttctaactcattttctcttttgactttaacttcagttggctatacacacacacacatacgcacacacacacacatctcccagtgtggaggcacacacttttacactcttaagaagtatattataaataattatgattcagtggtgtactggagacagtttgcactggcttgtgaagagccaactgttgaatcattttcaactctccactgggtgtcatcacattgataggttgaaattggccatggtagaattatttataccatgaaaatgagcaaaccttccaaattagtttttcttctctttttaatccatagatcaagtatgcggaaaagaattaacatagcaggactactatctttagaatgacctgcttacagagttggtccttgattactgtctggattgctggatttagggagggttctcaccattccctaacttttaagtcctcattgtgcctatgctgtgcaaactggggattatggggaacatctactttccttaaaagacattgattaaggctgggcagaggaaccttgatacatgctaggcagagggtggctattgatcatttcccaataaaaaccttaggaagtgagtctctaatgagcttcatgcctatgcaatatttcatatgtgttgtcagaattccctgttggaagaattaggtgtgtcctgcatgactgtactgggagaggattttggaagtttgctcctggtttcctccagactttatcccatgcaccttttccctttgctgatttttctttgtataattttgctgtaataaatcatagcactgaacacaattgtattctgagtcctgtaagtcctccaagcaaattaccaaacctggaggtggtcttggggaatccaaacacagcaaatttgtcagcacaccactgatcaaattgtgaaactctattcagccattaatataaattatctatatgttgtgtcctggaaatagactcatggtatactgttcaggagaaacaaacaaatacctaattcacaaaagtaatgtgtttgtgtgtgtgtgtgtgtgtaggcatgcatacacatgtgtgtgtttgaagacataggaaattatctgtatgattagctatcaaattcttaatatggtttcttttggatgctgatattggatagacagaacacaatacttcctccacatactttatataatgaaaacaaaaaaattaaatggtggaatttataaataatttgtaatttattttctgataacattgaaataaaaatacagagtagaaaacattatacttctaaatggcactgtattaatctgttctcatgctgctgataaagacatacccaagactgggtaatttgtaaacaaaaagaggtttaatagactcacagttccacatggctggggaggcctcacaatcattgtggaaggtgaaagccaagtcatacatgggggcagacaagagaaaaaatgagaaccaagcaaaaggggaaacccgttatgaaaccatcagatcccatgagacttattcagtattatgagaacagtatgggggaaaccacaaacatgattcaattacctcccagtgggtccctcccacaacatgtgggaattgtgggagctactattcaagatgagatttgggtggggacacagccaaaccatatcattctgcccctggcccctcccaaatctgatgtcctcacatttcaaaaccaatcataccttcccaatagtccctgaaagtcttaactcatttcagcattaactcaaaagtctacagtccaaagtctcatctaagacaaggcaaatatcctaccttaaatatacttcctatatacagtaaaagtacaggaattgggtaaatacagctgttccaaatgggagaaattcaccaaaacaaaggggctactggcctcatgcaagtccgaaatccagtggggtagtcaaatcttaaagctccaaaatgatctcctttgactccatgtctcacatctgggtcagcttctgcaagaggtaggttcccatggtgttggacagctccacttcagtggctttgcagggtacatcctccctcccagctactttcatgggccagcattgagcatctgagtgttttctaggtgcatgatgcaagctgtcagtggatctacctttcgggggtctagagaaccatggccctcttctcacagctccaccagcagtgccccagtggggactctgtgggggcttcaaccgcacatttcccttttacactgccctagcagaggttctcttgacttctgtgcacccacaggctcaacatcacatggaagctgccaaggcttggagtttgcagcctctgaaggcacagcctgagctaccttggccacttttagccatggctagagtgtctgggatgcagggcaccaagtccctaggctgcacacagcaggggatcactgggcctggcccacagaaccattttttccttctaggcctctgggcctatgatgggaggggctacctcaaaggtatctgacatgccgtggagacattttccccattgtcttggtgattaacatttggctccttgttacttacgcaaatttcttcaggggcttgaatttctcctcagaaaatgggtttttcttttctattgcatcatcaggctgcacatttttcaaactttcataccgtttcccttttaaaactgaatgcttttcacagcacccaaatcacctcttgaatgctttgctgcttagaaatttcttctgccagataccctaaatcatctctttcaagttcaaagttccagaaatctttagggcaggggcaaaatgccaccagtctttttgctaaaatacagcaagtgtcacttttactccagtttccaacaaattcctcaactccatctgagacaaactcagcctggatatcattgtccatcattatcagcattttggtcaaagccattcaccaagtctctaggaagttccaaactttcatacatttttctgtcttcttctgagccctccaaactgttccaacttctgcctgttacccagttccaaagtcgcttccacattttccagtatctttacagcatcacaccactctaccagtaccaatttcttgtattagtctgttctcacagtgctgataaagacacacctgagactgtgtaatttgtgaacaaaaaggggtttgatgaactcacagttccacatggctggggaggcttcacaatcattgtggaaggtgaaaggcatgttttacatggcagacaagagagaaaatagccatgtgaaaagggaagccccttataaaaccatcagattttgtgagacttattcactatcacaagaacagtatgggggaaactgcccccatggttcaattacctactaccaggtccctcctacaacatgtaggaattatgggagccataattcacgatgagattttggtggggacacagccaaaccatatcaggcaccatcagtaatgtcttttttagacttttgaatcatgggaaactgcaaatttgagttggacataataaaatataatatgttaaggatacttcattagccattaataattaactactaatgtttatgaacttcctgggtgtgtgacctttgcttggttctacaacatgtcatgtttcctgttccaaatgtcaaggaaatctccatgctctgtgtttaattttcatgcgtaggcagacaaatttgtcctctcaaatatggtcttggtccaaatttgtcaagtccacttcacttggtttctggttgttcatcaatatttttgtggttcagcaataatttttgtgaataatgacgcatactcacaagtttggtatcatgacaggtatctgaataattgataagatcatattaaaattaaatactagaaatatgatatatacagaattgaagcttttagatcaaacctaacaacatggtaaaataatgacctagagtttttccagattttcctcaattctctaataaataattcaagaggtgttattttctccatttacttcaaatacccattggtaaaattgctcccacattctacctcttggcccccacccacaacctctcaagaagctattacattataagtaaatattaggtggttaaaattgtattcatgcatatttgcacagtaggcagttaaatcagctccattactgtgttctatgaaactacataattacagacccttcaaagtgcatattattaacttggtgcatgactacctccaagcaaacatgctgtagatgagttgagtcaatattcacatggtatttttcagctttcagtcttgggaagaagtaaaatacagaggcttctgggtatgtggtaaggaagagttgaacatgaactaaattttccacataatcatctaagatttcaaatatccacttatcgatactctgttttataccaatatatgtatccaaaatatccaatgatttcctgaatgtcattgtgcatatgatatttgatttaatatatatgtatatgtgtatatttatatatacacacatatataaatgtacatatatacgtatataaatatatgtacccatacacatatgtataaaatcaaatatcatatgcacaaagacattcagaacatcactggattttatatatagtagccaggattgggataagccaattgacaaatgagaatataagtttatttagttaaaatagaaatatacgtttccagtgcatccaaatctaaacccacaatatccaccttgctactaaatgtgttcccctaggtttctagaaaaccggattagtctgcataggatttcttgggcattctagaataagagcaaaaagatatgaatagagttggagactttagtgcaaacctaggtaaaccttgggaaacatctttgcccctcattagagcacacatttctaatttgcagattcttcccatacccacaattatgactgctcaggtaacagtagggacacactcttcccttcttctttcttatttccaggttgatcacctttgttcagattgatgcatatttgcttcagaagccttgtaagttagattgtttctcctatggtcccaccctctccagttaaaaaatggctctcttcccaagagatagagatagactggtcatcttccccacttaccaataccacatccagaccaggactataccacagaccacccagcttgatcattgctgcacccttcttattcctattgtccctttccctctttcactgaagaatgagtacattgtcttcttcaccccaagttttaccatcaatgttggcaacatcaatatccacatgtatagttcataaaaccacctggcctctgtctatgacctcattttcagaaactcacctccacccctcctgagccacacactctcatgcttgagcccaccatcaacagagcctgctccatttatgaactattgaattaaaatgtcccactctaatgaccatattctcccattctatcttcaacctcctgcctcactgattcattcatgtccatgacaccacccatgtaataaaaccataaggctagatcagcttggacagcttttttttttttttttttttttgacaggatcttgctttgtcaccaattgttgggatgcagtggtgcaatcttggctctcttgcaggctgaaactcttgggctcaagcaatcatcccaccttagcatcctgaatagctgggactacaagtgtaggccatcatgccagctaattaaaaaaaaaagaaaaaatgttggagagaaaatgtctcactatttggcccaggctggtctcaaattcttgggctcaagggatcctccttcaacctccgaaaatgcagggattacaggcatgagtcaccatgtttggccatgtgttttctttatgttcacagtcctggacataaaggaatgactaactgacagcacagcctgactgcagctgattgtttctgataatcatgctacccatgctcaaacacacaaaaacatggcacgtgcaactctaaatgattgtccttgaaactcatttgagccttcagcccttgtttgactcatatgcagctctctctttccttctctactggagccatttcaattttttttatttcttctctctgaacttgacattcattcgtcttacttcaaagacgaaataagtcccatcaggtgggaacaacccccacttccagttgtcattctacatccatactttgtagactgtttcctctctgccttgtttgtttgctttcccttgcttctgaatactgtccaacagtattgcatcatgttgaaatcactcctcaattagtaattaagaaggaaacaacctactccaagcactgataaccccattaaaatatttctatttccctcttcactgaagccaaatttttccttctccttttccttttcattgaggtgaaattcaaatagcataaaatcaaccattttgaagtgaacaagtcagtggctattagtacatagacaatgttggacaaccatcatctctgtctgtctcctaaatattttcatcatctgaaaagaaaaccacgtatccaataaaccgttattccctattcttttccccaagcctctagcaaccaccgatctgttttctgtctgtgtgcatttacctatttggatatctcatattacatcaaatcatacaatgcatgaccttttgtgtttggtttcttttagttaacataaggttttcatagtatatccatatggtagtacatatcaatattttttgtgactgaataattttccattgtgtgtgtgtgtgtatatatgtatatgtatatatatatatacacatgcatatacatatatacattgtgacacatgggagcgtgaagtaattgaatcatgggtattttctgtgctattattgtgatagtaaataagtttcatgagatctgatggttttataaagaggagttgcccctgcacaagctctcttgcctgccaccatgtaagatgtgactttgctcctccttcaccttctgccatgattgtgatgcctccccagccatgtgaaagtgagtccatgaagcctgtttttctttataaattgcccagtcttgggtatgtctttattaccagcatgagaacagactaatataacatcctagagagtgtgacgtgataccctactatagtttggtaacttaggggatcagattctctccctccccagagttcactgttgttgatattttatggctatagatatccatttattcagttacttttgcaaactattttcacaaagaaagactgtatttcttgtcatttgtggtcactaaagtttctgctttgttatctcagtagtcagccagtgacctaacagaaatcagaaatgttcttaaacttttctttctttccctttctttctttctttctttctttctttctttctttctttctttctttctttctttctttctttctttctttttctttctttctttctcttcttttttgttttttttgacagggtctcactctgttgcccagactggagtgtagtggtgtgatcaaggctcacaggcatgcaccagcacacccatcatatttgttttgttttgtgtagaaatggggtcttgctgtgttgcgcaggaagggctcaaacttctgggctcaagcaatcctcgtgtgttggcctccgaaagtgcttggattacaggtgtgagccaccatgcttggccaaaatgattttcttcaaggctgcctatgactctgccctagtctttacctcctacttgcatggtgcctacagatcagccagaggtggaagcctagagtcctctcacatctgttctgagcatgttttgggtactgggcattttgtgtttcactctgtcttctctagcatatgtgatggctcttggaaccctcattttctcattaaccttcttctgcctcctccttcccagacctggagtttttgtctattgcttatcccatctgatatcccttttccaagtgcacatgggatatgtatgtgtttaaatcttttcacagccacttccaaagtctgagtagcgactccatcccaagttggaggggtggaatggtgatgaaacaattgtcagtctctgtaccattctctcagggaaccacaagacagaccaaaatccacaaccacagtattttagggacaaggtttgtattaataccctggcataaataagctaacaagcagcataggccactttctctgcagctgccactgctgcagccccacaacactagagaatggggaatggtattcaggtgggggaaatgtcacaatgctctctcactgaatttcagctgccctttaatggatttgactcaactttgatttgactcaactttgatttgactatctcatggactttccaagattttacttttgcaacacagctattttctgggtagtttttccaaagagttgaatttacaaggattctattaggattattatatctacagatttactatccccatttactctctgttcctctttctcattcaatccccgttgctatggtcttaatgtttgtgtcccctcctaatttatatatgggaacctaatcaccaatgcagtggcactagaagatggggccatggagagctaattaggtcttgagagtgaagtactcttgaatgggatcagtgcccttataaaagaggccccagagagctagctaaccccttccaccatgtgaggacacagctagaagttggcaatttgaaagggaaaggagagccctcacctgaatccaagcatgctgggaccccagtcatggacttctaagcttccagaactgtaagaaacaaatttatgttgtttataatcttactaggttatgctattttgctacagcagcccaaacagataaagacacttatcattgtctccattaattacttccatccatgaggatgctagatcaaagccaatcacaccatgtattttgaaaagttgttgcctgtatatattggcatttatattcatttctttttggcttctaatgctaagatttctttttttttcttccttgcttctttatttttctttttgccttgagagtatgttgggaatagtacagtgagtgagttctgtcatacttaacttttgaaaaaagaacaagaggctcagtggtctaactgtatatcatctcattacttaaaccttcaacttctcaacagaaagaaagataaatattgcaaaagagatttatcattgtttgagtaaaggcttgagtaaagactcatgattatagaacaagaattaccataaaggaaactacccactaaaaaccagattgcttgaaccttgcactattacttttttcaaaaagcaagtatctttatttatggatctcaaagatgtgctcttctctccctggagtccattcttgaccatactgatgactagaatgctgtctagacatcagactctcacccatcattctggtcattttgttgacccgttctctgccatcatagtagtctctccctgctctgctctttttctcatcactctaatatgtaacataggcactagggaaccctgatttcagattcgttcactgctggaacactgggaaagcctcatttccatggtaagcatcttggattgctccaagacaggatttatttttaacgttccacattgcacattgttggctctccaatatcttctggcaataagatgccaacaagacaaaacacatgaaaaagaagaaaaacacccaaacattttctttccccctttccatgttctccccaagccaagtttggaatggcttaaagagtgttttttcctcttccttttttctttgcctagaactggctgctgtgaggcatctttttggattcagacattttcctgtcggcttgccctggggtacctaccattgaagtctaatacattttacttattcaagattacactgcctaagggagaagcagctctctggttgaagaacaacaggctctacattttaaggattctgtattgagtgtaattagacacatacctttggatttatggctctgctaagtctttaacccattctgatcatctccaaggccacaaaaataaaaatgtcaaatgtatgtatagtggtttgtcactgtgtaaggtgaatcactagaagtagaaggcaagtgtttggtctttggagatggtcatgagcaacaaaccaaaagtttctgctaaaagtcttgagtttttccttgaagagaattgctccctggagaaagagtctaagtatacaattcatcaagattaccattgagtcacttctcctttgtttccccttttctttcatcatggcagacatctgcagtcatacgtatgcgaatatttgcaatgcatctttccccacttcaaacatctcaggtcattatcacaaaagaagttgtgttttgtggatgaatttttcccaagaaatagtgcatgggccattgattcactccacagttttactccagtctcaaagtatgtgtgggctttaaaatgaaagtatatagaatacggtttacctccatcattctcagcaaactattgcaaggacaaaaaaccaaacaccgcatgttctcactcataggtgggaattgaacaatgagaacacatggacacaggaaggggaacatcacacatcggggactgttgtgggatggggggatgggggagggatagcattaggagataaacctaatgctaaattacgagttaatgggtgcagcacaccaacatggcacatgtatccatatgtaacaaacctgcacgttgtgcacatgtaccctaaaacttaaagtataataattataatattaaaaaaaaagaaacatttcaaaagagcttcacctgtgagttacacaaagacgatgttgacacatcgtctttgtggagtccaccagtatagaaagctttttaactttctttgacctatctactactgaatgttttcttaaaaatatcatgctactgtaattgtggtcaggagatgagtgctagcatacaaactatttgtaacacacccatgaacaaagaagattaaaagtacattctcgaattttaaattgattacagagcagtaaccactattggtactgaatcctggaccgcatgatgagtagcactgtctcacaggccctagtactagccccaggaacacataacacattggcacagatttagaaaacaaatatctgatgtctataaatgtgtgtatgtgtttaaatagcttctcaaataaatttagaatcaaaaggttctataatctggggacttctacttttgagaagatggagtagacatatttttccctattcttcccactaagtacaaataaaaaccttggacatatatatacataaaacttaaggtgactctgaaagttatagagaagaagggaggctagctagggagcttgaggtccaaggaagcgcatggtagtgagtcttctgtgttttctttggcctcatgaatctcaggcagggtgctgggtgctggagaagccagcaacccaaaaacattaacaggcacagacaaagaaatctccaggctcacatggtttcactagggaacttcaccaagcatttaaaaagaaatcaacaccaactaacaatgagcatgttggacactgaaattaagaatccaacgccacttgtaattgctttaaaagagaataatgtatgtgtaagtctgacaaaacatataccaaacgtatatgctgaaaacaatacaatgctgattaaataaatcaaaggagacctaaaaaaaggaaaaaaaaaaagaatacagtttacctgttttccttctctgtaaaaaggaagaagaaataaagtaagttccacttactttaaaaaattagctagtcggggataagtatgaaaagatggaggtgcttatgtagaacttaactgagacttcgagttagaaagtgagttgtcagagactgagaagtaaaatttagttgagactataatgctgggagaacatcctctttgtgtttccaacagattccaggaatctagaaacataaaatcccctctaatttttttaagcatcaaagacaaaagcaaaccaaacaaatctgtgtatcacataaacaaacacaacagtaaaattgttgtacattgtatgagcattgctaaataatttcctctattaaaaatgatgaaaaagtcctgctctgatttatttgagattaccatgtggagatgttggggacaattttagtgagcccctttagagccagtctgatgtaagaagatcatgagccaacattcacaggctacacaaaggaaagatttattaggcagccagaaatccagacatctagcaggtttggcattattctgctcaccacagtagaaattacccaagacttcgttaatgcttgcttggttgcaaatgtcttactgctgcttatacagtgctccttgggcagtgattttcatttggaagagctattgacaatacgtatttttttttttctaaaaaagaataaacggccaaacaatatgctcatcaccaagtaacaatgattacagccaaagcaaaataaagggattaaaaatcgtctgatagccacttatttttttggctaagagagttccttccatagacatttataggtagagtctttatacctttgccataactgtcttttaattattttattccagaaagcaccaattacatttgctgtatcttagaaaattattcctagtccccaatgctgagtagttgtactttcttgactaagaattattagtagaatgaagacataagagtgtactcatctccatcttcttgctcttgaaggcattgagtacacttcaaagatcccagctcaagtgctagggataatccataaccttagcaagatcaagctcagtttctatttcttaatctccatttacagtgtggcaccagtctctgtattgccaggtttacactgagaaagcactattcatgtttcagttaatcaagagaacatctcttggatttacctgtcaaagaacatttcctctttattcttgaagacagaactctagttttcttttgtaaacgctatccctgctctactctcattagatgtggcttgggtatggctattgcaccaaaccctgcatcccttcaatgatgaatgaggataggatctatcgcagactgttggtgctctgcccatatctcttcaaataccccttccatttccatgtgtaaaattttagcctccatcagctagcaaaagcatgcttgctggacatctgccttcatgttgacgaaaccttcttttctcatgcacaaggcaggtggaaagtgactgggggatggggaatccgtctggaggtaggccttacctaatatctgatgggtatagcaatgtaagtaccccgaatctctcacttcttggcaagggtaattattaggtattggtttagccagaggctattactgcaaagttaaactataatatttcactggtatctgatttaacagtactgcttaaatcggctgacttccctgtcacccacctgtgttccttgcaatttccaataaactgttttcactggaatccttagctcaaggtctacttctggggaaacctgaaccaaaataaaaaccaaaatctggcacatcagattattccatcttctggcttcagtgactaattatggagacctaggcctttccctggaataattaaataagaggtactttctttctgttgggattccttagtatatgaaatgtaagctggtacttttccttatcttttccactacacaagaagagccttctgtgagaacaaagcaaaccctcaagaaaatcatttcaaggaatagagaaggagattttcttgatgaattcagccatacatgaaactctgatttacctcaagcctcttcaattatgtgagtccacttcttttctcaccattttgaaagccagattgagtgaagcttctgtttcttgaagctgaaagaagtaggactaaatttagataaaagctagaagatttgatcttggcctcttctcaatgcagtactggccagcaaggtgggggcttagtaccacagtttctcaatttatgatgcatatggtggttagctgttggctcaaaatggaagttgtggactatggtgtctgaatactgaggaatttactttttctgtttttaccaaataagtttagagaggccacacttcaaatttcactggaatagaggggaaaatgtcttatttcatcacctttcttctcatgtgaaaatttttagaggagatgggcaaatggtctttgagggcaaagaattatggaattatgtagtgaagaaatttgttcacatgaggtaacggattgtcttaaattttgctgtgtaaattgcaggctgcattttttgttttaattaagcaatgccagaaatggtttcgtggcattttccttccaggattgggaacctacacacatcagctttgcacatgagaaccagaaattaaaactgaccacagctaatgggaacctgctcaggctcactttataggctcactgagagaagtgcaaagagaaaacaggctaagtgaagaaggaaaaacacaaggcttccctttcaataagttttaataatgtataatcccccagagagtaacatatgaacagaattataaattctctgttggttacttttctaccatttaggacttgttaagtacccaaagggaattgttggccctttatatttttaattcaacttcagtgtcttcaattagagcatgctgtcagaataagtagtcctcttcaaatacatggttgagaatgactaatgctaaatcttgaggcattcctatcccagtgaagatttaagggctgaatattcccgagggactctttgttggcaaggtggcctcttctggaatgatctgtcaagtgtgcacaatctgactatcatgtgcatgaagtaagatgtgaacaaatggacatccaggagataattgtcacggttgttagcctttttaaatgatctctggagatatcttctgcttccaccatcaagtcttttgtttggggttttacctcattttcaggcttagctttgaagatattgtaagatagttgtttgaaggcatacagcactccctagttatatgtattccagcacactcaggacgggcactaaatatgaagagaaaattttattaacaactatagtgacccaatagcaaaaaagggcaaaagaatgtattctttttagtctgatctctggagcctgctcttgtctttggaaattaagaatttcactcaggggactggtggccacctgcagttgtgtgtgtttatttttttaaagccttcctgtttactcaaatggctctcctgcattggatttctctcaattgcatgttgtgggccctgtcctaggttttttactccccctctttttctgtaactgaaccttcctaaagacgagctccttagaaaaggtgaggttcccaaagccaaggtaagaagttaaggagtggtttgtaattcagttgcaaatctgtagaacagaaagatgctcttttctgttatccactgatatataacaaaccacccccaaacttgatgcattaaaacaagaaattattacttatcaagattatgtagattatggggtggttcttctgttggtttcacaggagatcactcaagtggctgtatttatctggtgagttagttaaaattgaaggttctaccatggcatcatccttcacagtaataaaagaaaaatgcagatggcaaatacaggcagtctctgttagctcttttccttgaagtattagcagatgtgagcctgggagagataactcaagtatatctgtcttactctgattttgggaatagagggatctcctggctgaggcatcaggtcaactgaagaatatttacattgttggaggtgttgtaaaatacagcctcattctaaacatttagcaatggtgaggccccacaaaggaaaaaaatagttggctggaacaagatggcttgattttttatggtggagcagaaagaggagtaggatagtaaatgaaagagttaacaattgcctttcaaaataccccaaatcccctgatttgtagtatttgttgatttccattctacaaacacttctactgtggctaatgtcaagcttccattcaagttaagaaggcacgtgcacaattaactcttgaaatcctatgcaagctttccctagcacaccagttgatcaagaagaatgaacaaataaaaaaattaaaacaatatcaagacatggaaaagagaagttctctgggttctaaaacacaatggtgaaatgtgagtatagggatgggagatggaacagaatcattggtgaaatcctctgctacctacataggaatgcctcaagtgttcttaaaatgcatgcacagaccaaaatgcaccaaaaagaaaaaaaaataagaaagaacaaaaggacaatacaatagagaggaaagtaaaatttaaagtgttcagtttgggctcaaagtcattactaaaacatgaagtagacaaatcagtcactaggtttgattgcctatctaggagatttgacctgagatgagtatgggatataaaatgagcaccacattgaaggatgtctgagattgaaagaatggaaaaagcctgatgaaggacccaggaatgtgaacacagctctggctctcttattagtccaactctgtggccttgaacatttggcctatactttttttttcttttctctataaatctttgctgagtaaatgtatcccaatgcaacaataatcacttccagagagagagggaggaagagagagaattgtgtgaagacagccatgtcctaactaaccatgtaatagtacaaaatctagagtgtacaacttaagggaagaggtaggtggctcttgtttatctcaaaagaatggggaaagagaatacacacccagcagaaacatctttgtcatgggaagatattggttctagcagagcacatgaagttcttcgctgccagatagtgtgtgatatcaccaggtaaaccagaacaaggcaggaagtgatggcctcaaattggtcctgggtcaggggactgtgagttggccatgatgtcctgaacaagcagagctgttcctcctaagggaaatatcagtagaggtgctgagtgaagttcacccaacccttacccagcttcctacactgaagtttcctcattattctttgtaaagtatttttattaagtacagattactaatatatttctattaagtacatacacttttcttctgtgaaatgctaccctaaaacagttcattaagcaacaaagagggatcccgtcttacattctagaattatgtcctatgaaattaccccaaattgattcattgacatagttgaatattggcagaatcatatggtttggctgaattttatcaaaaatcaattagctaaaaatctattaaaatatttatatatatatcagtcagtctgttcagtacatacattccatttgtagaatatgttctgaattagtctttgccacctgtgaattacagtaaacttccttgttgatctcccgttatttattcctctggacccatgactcactgtcttctctttcatttaagactttgagtccaggagattgacaccggcctggctacatgatgagacctcatctccacaacattttttttttttagttagccagacatggtggcatgcacctgtggtcccagctattctgagggttgaggtaaaatgatcgctcaaatctgggaggttgaggctgccgtcagctgtgtttgcactactgtactccatcctgaaagacagagtgagaccctgtctgaaaaaaaaagaaaaaaaaggactttggctttgccatgttagtaaaggcaatgacagaaatgctggccctggcctggcaggtctgccttcagtgactcaaatggctgcctaatgatattagcaaaatccatttattcatgcaacaaatatatatgcctctatttcttcagcatatgcttttatggctacctttgtagttcctatgaaccactgattccatggtgttttggtttactgcttgacccattggataaagaaacagctgtatgtgtatataaagccagtcaactctgaagaatgctcattcttctgatctttccaaagacctgtaagaagagtggagtatgtctatttatccacctactgcctctgacaaggaagggagggaagtcctgggagatttcagtttcaattctagactactggaatgtgttttaaaggatatcatttggaaagcaatttaaaaaagacttagttatcctttgccatgtgctacctcgcatcaaaatcaaatggtttgttcgatcagtgacctgacgagtactggatagggagacggtcacaaccaactcagttaagtttttagtctgaggcctttcctaatacagataattagcccacacttctattgagagatttctccatttccagtctagacaaggaacaagccaagtctaagcctcatcccttctcttaccttgaggtatattttgactgcctatggttttgatatttgagttctatctgtatgtcctgctgataattgactctaggaaaataagcacatttacagctatcttgggaacttagctgtttatctgtatctgcatatgcccacaactgcattccacatgaccctgaccctgccactctatatgtagagtaacatacagaaagtgattacatttaaggtgcctggctgcaaggccaggattgggaggagtctattttgagtggaagactttactttggcaaattgtgccaaactatgatacttttctgcctaggaagacttctggctcacccactgaggagtttgcatgtcattccagcacatggtctactgtgggacttactgagtagtagcaaaataactatatctaattatgttaagatcatgagtgtgatcttatgttgagactggaatcctttgaaagcacaaactgtcttcaagcccccatccaaatctaaagggaagttatccataaaacttgcaatgtaacattgtttagcagacactcatctatctcctttgaaaccaaagctttataggtgccctgattgttgtaacagtctgagtgtttgatgtttacaagaaatgaatttctaggaactcagaaaagcgaggaagagaaaagagcattgccaagtcaaattcagctcatccttgctgcttctgatgccattttgcccacgtaaatcctcacagtgttccagcccctgatgagtcacatcttccgtcatcttcagatcaggagataatcatctatgtcaaagatattttgatttggtcttcctcaagctcattttctgagatgtcctaccccagctacattgcaaagattgagatgaagtgtgaatagagccagaactggaggaactcaacgccatggctttgcaggtttggcttcaatcaagtactcagagctttgattaaagatattactaaggaatcaggccaggtgcagtggctcacgcttgtaatcccaacactttgggaggtcgaggcgggtggatcacgaggtcaggagttcaagaccaaactgaccaacatggtgaaaccccatctctactaaaaatacaaaaattagccaggcgtggtgttgggcgcctgtaatcccagctactcgggaggctgaggcaggagaatcgcttgatcccaggaggtggaggctgcagtgagccgtgattgtgccactacactcctgcctgggtgacagagcaaggctgtgactcaaaaaaaaaaggaaaacaaaataaaacaaagcaaaagtaaacttctttttctctcttagccttttctaaatgtaggttaatcaatactcaagttgaatgtgaagtggctttaattttttttccacaaatattcaataacacatacatatttacaccaatttaaatttgtttctgaatattgagcgccattctgttataataataataataattattattattattattgttgttataataataattattattattgttataataataataataataattattattattattattagagatggagtctccctctgtcacccaggctggagttcaggggcacaatctttcctcactgcagcctctgcctccagagttcaagtgtttctcctgtgtcaacctccagagtagctgggattacaggcacatgtcaccatgcccagctaaggttttttgtatttttagtagtagagacagggtttcaccatgttggccaggctagtttcgaactcctaacctcaggcaatccactcgcctttgcctcccaaagtgctgggattacaaacgtgagccaccatgctccaccctgttaatttcttttttaatagtagagccagcttttcaagcaaggggagcttcttttatttaaaataaccttttgttgccatatttaaattgatttggttaatttccaggaatataattgttctggggtaataagatttctttttttgagagagggcctcgacctcccctggctcaagtgatcctcccacctcagcctcccaaagtgctggaattacagtcatgagccatgtgcctggacaatgggatgataagatttaaaattgcctacctcactatgacattagagaggtcatctacatcccaatcctaaataagcaggaataagaaagcctgaagtcccagctactcgggaggctgaggcaggagaatcaattgaacccaggaggcaaaagttgcattgagccaagatggtgccactgaactccagcctggatgacagagcaagactctgtctcaattgaaaaaaaaaaaaattatcaagcatgagtagctagaaatgggcttacctttgacaaccagctatcctccccttcaaatactggacactttcccactctccattctacagagggaatgcgctctttagcctaattaaatgttctaggataagcctctaaagggagcataggaccaattaaatgagcaggaccaagccctttgggcatttctccctttaagttataattctgatagggtaagtctgtgaggaacattaacaatgccattcaaggctcagcagtctttcatttagaaggtcctgtgattcctctccattgggaaagggtgaggtgaggtcttgtttgaagtagtgcccatagcagggggaggaaatgactcagtggcctcggccacacaactgtaaaactcttcttgcaagaggaaccgtgcttgaacttggcagcctaagcaaagtctcagcatgattcaagcttagagtcaatctagcttttactggctgaaataataataccccatggggctcctccaagctacagctgaggaatggatatggagatagtgaaactctttctgagacgcatgtggaaactgggaccacggggtgaatggggcctgattgtgacatagcgttgggaaggcaggaatttcaatatttacgctaaactcgctttctaactgtgggcagaacacatctctgctttatttttttaatcttttgagataaatatgaaatttaaataaaatttatttaaggtgaatttttattttcttttataacatgatcacttttttaatattgggaaagttttgattctcctctattagcatgtgactatttgccagaaatagagtgcctttaaaatcaataaatatacttgggaaaaaaataataaaagatatctaaattttactgaacaataggtcagaagccccatttttattaataaagcacagcacaattgtaagcttaaattatttgcagtgtctctacttatgaagcaaagatctttgaggatttactacgtgttgagcccattgcaaaggttgagcgtacaggagcagatatgacattgtctttgctatcaaggagctggctgtcttgtgagggggcagacaaagtcattgtaagtgcttttgttttgttttgttttattgtggtaagaacacttaacttgaaatgtatcctcttaacccagtcttaagtgtatgacacatattgactctaggtacaatgttgtacagcagatcttagagctgattcaacttgcttaactgaaaccttatgcctgttgattagtaactccccatttctccctcctcctaatccctggcaatcaccattctactctctgcttctaagaacttgactatttaggatacctcatataaatgaaatgaaagcatatttgtctttctgtgattgccttttcacttagcataatgtcctcaaggctcatccatgttgtcacatattacagaatttcctcctctttcaaggttgaataagtattccatggcatgtctataccacagtttctttttccattcatgtgttgatggacagttaggttgtttccacatcttggctattgtgaatggtactgcaatgaacatgagagtgctgatatcccttcaggattctgatttcaattcttttgggaaaataccgagaagtgacattgctgaatcatatggtgttataaaagaggtttttcttagtgtcctactggaacagaaacaagtaaaatgtaacgggctcagtcaaagtgctagggataactgggtcagatgacaaacccagaaccatgtagcaggaggtaaaaggagaagattgagtagaagtgatggggaacagagatgataagacacgtggtgcaccaggataactgagaacacagcaccttggatgaaactcaagtggtccaatttgcctgcagcaaaagatgctggtggagcaaaaaatgagattggagaggtagggtggggtccttttccttttataaacccaaaatcctgcagacaatttttgtcacggaacatcataaaaggaagtattaagtagataagaagttactggcttctttcatgacaacaaagccatttaagtgattaaactggagttccaaagttttctgcccatcagatcattgcataaatttaatgtttttatttttagcattactaataaaaatctagtagagaaaaaaaaaaataaaaagacaaacccagaaccatgtagcaggaggtaaatggtaaaatcaagtcagatcacacagagaactctgaggctacagacttcttgtttttacctcactttattaaaattatgcatgaaacatttatggccatttttatttcatgttataatgttataatccagatatcatgttatttccatgaataagaaaaggaagttttcatttgacccattttacattagggagttaaaataagggaaatgatcaggtcaaaagtttcactcctggaattaaaattgtgtcaagacccaataaagttgtgtcttgtttcattcctagttcaccaatttatgcaaccggtaaattttctctcccaataatctaaaattgagtaagatctggtataccatgtaattctttttttctcatctattttttaatcttttgttatccttcattttattctgtgtcctatatctcctgaagtttcaaaaagacaaaaataagtatgaaaaggtagtgcagtgctatgtattttatcgtttatgtaattagacattcacattatacctttgaagagtgattgataagatcatccctatttctttcattactactcataatgattcagtgctatggttttaatttctccagcacttttattctaaggaacagaagcacaaaaggggctttgctactctgagtcataggtgtataaaaaataaagtttgtggagaaaagaaagacctctataaagaaatgaagaaccttgctaatcagtggtgagactgtgactaagaccatttctttaagagtttgggtttacagataggggaggagcatggtggatgcgggacagagataggacatgggatttgaaactgaaagacatcattttggccaggtggcttacacctgtaatcctagcactttgggaggctgaggtgggagtatcactacagcccaggagttcaagaccagcctgggcaacatagtaagaccctgtctctacatttttttttttaattagctgggcatagtagcatatgcctgtagacccagcaacttaggaggctgaactgggaggattgcttgagcctgggagttcaaggaagcagtaagctgagatcatgctactgcactccagcctgggcaacacagtgagactctgtctcaaaaaaaaagaaagaaaggaaaaaacaagatgtcatttcaaatctaatttagccatttactgattgttggctatatataagataagattatagtctttttctaggactatacgattacttgtaagtattagttataatacatgcatatatatgtatagtctgacatgtagtagaggtcactaaacagtagctactcattaagctctactcaagactgcagcctgggatcacaaagtaagaatatagcaaagctgagattcagctttgtcttttcatgcaccttctgtgtatggaaaagtttagtcatttgagttaaaaaacagagcaatgttgctggttgaatattattggtgagagtgagcttcctaggtgcatgtctaggctcaaggatgcaacacaaaacaaaatatccaagtgataaacttataaactggggcatttgagacgtgtgattgttttctgctatactatatgattttacctggcagcattttctaaagattaagtcatgttttataattacactgtttcctctttcccaattagtgaccattccttcctgctcttccagtagttccttctatcttttgcatttcttcatggtagaaatgtaataaggaaccatttggttttcaacattcttctttatgctggactaatcccagttcatactcacttgaatacgaaagcaaaacatttgaaacaaagtaaaattatgaacataaaaccataaaattcaattgctttcataaaataattcattttcaatttattccttctaagatgctaggtgtgcactgagtggggcacttttgcatgatttcatgaggattaaggtagatgtttttgagaacatgcattttaattgctctgaggacttctttactctccatttattatattctctggaaatcaattttttatttcagaataaaataaggtttattagatatagcttttaaaactgcgaggggaactgtcagtgcaaaagaaaaacttcaaagttacctattaactagtcaaattatcagctcaaatatactatctgtctaagagtgaaagtacctatgaaattgagaatccatagaattttagaggaatcactaaacacatgcatttgaactatagacctttataaaagagaaagctggagttcagattaataattaaatgattatgtgatctattggtgttgacacatgtttccattctaggagatggagggggaccaaggccaagcgtaatgaatctgttccagccactgctctccattaaacatgtactggctgtcttgttgacatatcctagagaccagagaagtgtctacaaatgtcactgtggtacttaacaatatctgaaagtgttattctctcatgatatttctactactgcacaataattagtagaaaaagaattgcacggtttaaaatttttgtgtaattactaatgcagtttaggtatatatataaacattatatataaatgtaataatacagtttatatatactagtacagtttatatatattctaatacagtttattatgtaactgtatttgtgtgtatatatatacataaattatatactatatttgtatatatacacacccacactacatagtatgtatatatatacacacgcactatatatatttttatacacaatgtccagcaatgtagccaggtattgctggcctttgggtcctacaaagtcttaatctcagcctaccaggacactggcaaaacccctaggctttttttggtgggggttggggctggaggatggtggaagaggggaggatcctaaggaaatgtctgaccgctatctaacttctgtctcccacatctaatgttgattattttcatggctcaaaactaatacataagataagttcagaggatttgtatttttaactattgaaatgtcggggtaaggaatttaatgctttttttttctatgctgtcactacaatgggaggagtggtctaaatatgttggctttacataagttaaatgttgaacacacaagtcaatgattgttataacattgagaaaagatttattttgaatatgcggaactaattgcattagcagaaaaagacagaatctgctcacatgatatttcagagaataacattaaaacaaggtcgattttttttagtcaaactgagccattatacttctatgataaccctctaatactttattgtgtttatatgtttacgagcatattttcctaaccatcaggtgcttctcttatgttccattcacctttatatcttttccatctagcatagaggctactgtgtcgaatgtgtttaataaataaatgggtgtcaacaaaggaagtgataggtcaatggattgagcaaacataatgggggctttgaaaaaagttggagaatttggcatgatgtggatgaattgaaaatatgtgctaagtggaacatgcataaaggcataaaagttaagtatgtcagggcatgttaaaatcattatgttagattgagtatcagcactacatttctaaatatttgccatagtttgattctaaaatatgttcaaaagcttcccttttttaccctgaggatagtgtgaggtttttctctatcagtctaccatcaaggttgtaattaagtcattcagtctgtggcctatatttatgattacaatatgtgatcaaggattacaaacactaggaaaactgtattgtcacactgtctaattattgtgttaaggaatgacagcagacaaacatttcatctcttactagaaagaagaaatctgacagaacctgggagttcactttgatgttggattcgtatatgaaagtatcaaagattgaattattttcaaaccgaacatccaatgttggtttcatccaagcagtcagttttctgctctaccaccacatttttctttgaagtagcatagcctagagtttattaggatctatttactgcaggtaggacaatgaaattcaggaaggtaaaagaaaagtcagaagaaaatgcaacagcgggtttataagttgatttctgaaatgtgtaaggtgctaacagacacagacacttactgtgaaagacctagagggaccaatggtacataaaatgtggccctcagaccagtagcatcagtggccattggaaatgcaaactctcaggcttcactccagacctactgaatcagaaattctgaggctgaggttcagtaatctattttttcttttcttttctttttcttttttttgagactgagtcttgctctgtcacccaggctggagggcagtggcgtgatctcggcccactgcaacatccgcctcccaggttcaagcaattctcctgccaccatgctgggctaatttttgtattttttttagtagagacggggtttcaccatgctggccagccttgtctcaaactcctgatcttgtgatctgcctgccttggcctcccaaagtgctgggattacaggcgtgagccaccatgcccagccagtaatctatgttttaacaggtccttcgggttgtactaatgcccagtaaagtttaagaaacaccgacctaaacaatgcacaaaatggatctcatgcatccttttttcaatttcctaattttattggctctaggtctggaatgacttcttttacagttattcaagttatctgtaaactcacttctccaaacaatttgtcatttacatatattcttgattatgctgctctctaattgctttatatatgttaattgtgtctccctaaaagtctgtaaatgccgccacaagttagtgtatcttatagaattatatattcctggctgcagaaacaggaaaggacaaagaataaactcaagtatttgttggttaattggcaatgctaagtagcatccataatgggctccataaatgattagagaagaagataagcctatagtgacaattatttttatcctgtatttcatcaatagtgacaaagtccccagtgtatcttgttactcaagttacagtcagaaaaatgaaaaagaaatgtacgatgggagaaacatccataaagatttattctctggggcacagaccatgtatagctcatctgtgcatctacattacatggaactgagtctgggagaaaaaggtgccccatgttcaggacttgggtattgaaatccaggtgacaaagaggaggcaaatattgaaggaagagagaaagacatacaaaatgataaaatcaaagggtgtgtgatttttttttaaaaaaacttaggtattgaaggctgatagaaaaaatgatataactttagtgttgttatgaatttcaataagttgatgtgtggtggttgttaaaagacattagagtcagcaaatttgaatttaaatcaaatcctagtgccttatcaggaagctgctaaatctctttgtaactcagtttacttattttaaaagtgggaatattaatatttatcttataagataatcttgaaatttcaataaagcagctaaagcttctgtcagagtgagtatagcagatatctaatcaataaaatttgttattttttacatttcttggtttatatacacacataaatatatacatataggtatatatgtgtgtgtgtatatatatttatatatatatagacagagagagagagagagagagatttattataaagtttgcacagatggaaagtctagaaatcctggagagttgcagttttggctcaagtctgaaggcagtctggcagtctgcaggccagttttcttctgcctccaaaggatctctttcttttgctcatgaggccttcaaatgattgggtaaggcccactcattgcagaaggtagtttgcctgattcaggttctaattatttaaatgttaatcacattcaaggaaatgctttcacagcaacatctagattggtgtttgaccaaacacctgggcaccatagcttagtcaggttgacatgtaaaattaaccgtcacatggggtgaattcctagactgctccctgctattagattatgccattaagatttccatacttgtgtgaactgatgacatgtcacccattttccttgccataaaacatattagaaagcaaagcttaactgatggtatacgagttgacaacagagaaacaaaacttgaatcctagacagatctgctacaatgttgtagatctttaagaaggtcttaagtgaagaaggtttgagagcatctgggtcctccattgttttccctccatgcctcagtgactctagaagccatgagttgagatggcaatgccaaacaatggtggggctcccacacttgttatcaatgaagcatgatgggatggtgagaggtgaggctagtctgtactccatttcctccttttccttcccctggtgtcagaaactgccagccagaagctaagcttatcccaccttccaacaagtgagcatgaatgagccttccacttctcccttccccaggatcagcaaggcccaggaggaaagtaaaataccccagaacccccacttgtggtcagtaaagaaagcctgtgcctcacttttcctggcatggttttgacaaggcccagtgggaaataaagctctcaacatggaaatccaggtttccttcaatctaattcaattattttcttttttccccagtgattctcaaaggacaatccttagctgggcagcatcacaatcacttgggaacctgtttagaaactcaacttcctaggcttcactccaacccacaccaccctcttggtcctcagagtacattgcaataggtgtgctctctgcttaaaaagagaattaaatagcatccagagtcttatagtatccaaaatgtttaggatacaatagaaaatcactcattctaccaagaaccaggaaaaccacaactagaatgagatcaaataatgaatagagatgctttagaggttggaatttcctgacaaatactttaaagcaaccatcataaaagtattttaacaagcaattacaaattctcttgaagcaaatatgaaattagaaaaatctcagcaaagaaaaaagttataaatagagtaaccaaatataattttagaattgatatataaaataattgcaataaaaacccactgtaggttttcaactgtagagtgaagtagacagagggtagaatcagtaaacttgaggacagatcaacagaatttagccaaactgaacaacagaaaatagcctacacagaaaatagcctagaaaacaatgaacaaaatttcaagggcttttatgggacaaaaacaaaagcattagcatctgtattatcagagtgacagaacaaaaagagtgagactagaaaggaatttaaagaaatgatgtctgaaaacttcacaaatttgtgaaagacaaaagcttacagattcaagagtctgagggaaccctaaataggataaacccaaagaagtcacagccagaatacatcataattgaaacctctgaaaactaaagacaaaaaaaatcccaaaagcagccagagaacaacagcacattatttatagggaaacagcaatcaaataacaatcaaataataggtaatttctaattcaatatcatggacacaggaaaggcatagcatattagtcaagtattgaaagaacctgtctactataaattctatatccattgtaaatatcctttaggaataaaagagaaagaaagatattctctgatgaagaaaagcaaagaagattagttcctagcaaactgacttttttgtttgtttgtttgaatggagtttccctctgtcacccacgctagagtgcaatggtgcgatcttggctcactgcaacctccacctctcgggttcaagtgattcttctgcctcagcctcccaagtagctgggattacaggtgcccaccaccacgcccagttaatttttgtatttttagtagagatggggtttcaccatgttggccaggctggtctcgaactcctgacctcaggtgatccacctgccttggcctcccaaagtgctgggattacaggcataagccaccatggctggccacaaactgactcttaaagaatggttacaataatttttctaaacagagtgtgtgttagtttgctatagactggctagctagtctttaagcatgtcttgatttcttagtcttacagctagaccacatttcctgaattacttattcttaatgtggttctgtgactgagttcaagccaatggaatatgatcttctcttctttgaagacgttctataaaaatcttctatgtgtgatttcctaaagttatttcatttttcattggcaggagttgaagatgttggaagaataagataaaaagtacttgagtccctgaaacaccacttggagcaaagctgtccattaatcaggatgaactgtttgggaaatataaatacatttccacttgagaccaaccattatacattgttagaaatttgctattttttttgttacagcagttggcatatccttgacaagtagaataaaacaactctttaaggtgtgggaagagttacataagaatatctatgctagtttatcattaagtgtttaggcctttatctgttataggtgcagataatcttcaaagaatcacaaaaatatcttcttgttttatgttttagtaggaaagactaacataaaactgtttttctcctaagacataactaattaacctcactgaaaacaatttttaagcagaagaaaaagttgtgttcaaatttaagggatgagtgattttattttcagggaagctagataagaattttctgttgagtgaaggggtttgaagtcattgagcttctgtattacagtagaatggaatagcaggaagggaaagagaagcccaggatttgtttacttaggttgtacttctggatagtcttgactttagtggaagtggttggggtaattctttaatgggaaatatgaaaagtacaggttgcaaagatagagagttcacgagaataaaagagggggaggagaaaggagaaagttcatgagtttggcaaactgtatgtatctcaaaaaattaatgctgcacgataaataaaatttgtggctgtgtacttttacatacataaattagaggtaaaatctctagagttttagattaatacaagatccacttttttgtatctgtttgatatttttggaagagtcttaagatccttttttaaaaaaatacagctatacacagatgtatttgtgtatgtgttgcatatctattcgtttgagagattaagaaaaagaaaagcagaaagagaaaaagagagagagagagacattattagtttacctttccattcttccattttaaccggagctctaggaatgtaagaattgaagggcaacagaggaactattttatgagcatccacaaagaacttttaaccattttatgaagttagtgattcctaatttctccgtagtaaaccaagagatcaacagtaatgctggaaaatattttccctaaccttgaatgcatttattaaaccattgcttgtgtcaagtttccttgagattttaaatggaactctgccaagatatgccacaacgagcaaaaagaatgtgcttcccttcaggacctgtgtagtgaatctgagaagaagtttctgtgagctcttgagaagaatcattttgtatcaacagggggaaatccgcagagcttctgttttaagacattgtgttcaatagttaagtatttctttcaagccttaccatgctgctctcatgtaggcgtccccgttctcttggaaggcagtgtgttgcacagacaatatgcagaagccacatcaaagatgatggtgatcatggccaggggcatttcagattatgtgaatgaataaaagctgcttttcaaaacgcaagcctttttccccatctgttgatgtactgccacagattgtgaatagcaacactttgtttcctgttgctgaaattgtgagattctggttgggcataagaagtgggaagtcaggattgtgtgtatgaaaagaatcacttggcaccttgcttcttgaccagttctcttcaaattagagacttcatttctgagaagtctctcactattcagaagtaatgtcttgctttggggtttgaaccaagttccataataatttaatttgtcataaaatcaagaaacttgttggaaaaagtgtgggtggtcatcatgaaatgaggcatagcagtggccaaatatgacagcagagaaaagcctagggcctcataactaaataaagggagaaaattgttcttaaggtacaaatgaatcatctttaggccatgtaaaaactaaattcatcccctgaataccttgagactctccatagacaatctagaccatgggaacagaggatttcattgatcccattgctgtttcaacttcctaaagacctttgacatttcttgaacccttaagaaaaagatttagtgacgtagcaattaatattaagtcaggccttggcatttatgccatggtttgaatatgtcccccaaacttcatgtgtttacaactaaaaatgtcgttataacaatattaagaagtgggtcatttaagaggtgatttgtccacgagagttctgccctcatgaacggattaattctcttattgcaggagtaggttagctattgcaggactttggccctcattttgtctccctgtctcttgtgttcactctgccttctgacatgagatgatgctaccagatgccagcaccatgctcttgaacttcccagccttcagaaccgtgagccaaacaaacttctgttctttgtaaattatatagtttgtggcattttgttaaaatagcagaaaaccaactaacacaatatggaatgtccaccttctttgaggtaatgactttgtcattcagtcatagcaatcaattttatgatagttttgtcatactccccactaccatttttagtttataaagaaaccaaaactggaaaagtttgggttacctcctaatgtagctacactaatattgttaaagtggaacttcaatacccatcttaggagtccaaagcctcatgttcctttctcccatactgtgaagcttctcttattaggtgctgaagcatttcattactaggcagaccctagtaatggctcaacaatgtggtcacttctcaaaagattaaaaacaaatacgaataaattttatagaagtcttttttgacctttaagctctattaaaaccataactctttaaaagttatttttaatggatctaatgtcaaaataatctgttatacattaggacaagaaagtaggggagtgggcatattctgtcatctctataatgatagtaataataataacaataatagttaagataattgagtatgaactatatgtcagttatggtcctaggcatttcatatagatgcctcactttagtagccatatcatttttttgaaattattaatccattttatagatgagcaaccagaaacacaaggtaaataacttacaaataatttaagacacgccaactctcttaatcactgtgcagttctgtctcctgtctattcttatcattctttcttttatcaattattggctgactaggtatcatgtgccaagctcttgatccagaggcactgttcagtagaaatataatgcaagttgcatatgtcatttcaaactttctagtagtcacattacaagtaaaagagaaagagcagaaaataattttaacaattagttaacccaatatgttcaaactatcatcatttcaatatatgtgatattttacctcctttttttcttactaagtctttaaaatttggttatatgctttatacttataacatatcctaattcaagctaggcacatttcaagtgctcaattgctatatgtttttagtggatatcttatcaggcagcacagggctagaaacttggaatacagcactgagaaacaaaaacatgtccttgccattgtgaaatgtaagtccaaaatcatactgaggggtcctgtctgatgtgctgtgggaacagctgagaggccaggatgactggagtaatctaagaaaggggtgtactgaggttagagaggaaaagagggtcaggcaaggtgggcccttaagagtcactagaaaaactgaattttactgagtgctataggcaatctttggagagttttaaatagaggaatgacaaaacatgacttaaataggatttctctgggtgctatattgagataggttgtggttggggattaggggagaggagaagtcaggaggcctgttaagggatagctgtagtgctccaagtgagggatggtaatagtttggaacatggtgataacagtggaagtggttagatttggttgggttctggatatatttcatttgatagtaaaaataagggtataatgtaaaatagatttttccattttattgttaatgaaaaaaccctccaaacctataaataaggctaagagaatggcttcattttctcataaggattatttgaccttttaaaagaatgtgccattggtggatgttgctatattctaaaattaaggctacagtctttgtgaagttatacgataacttgatctgtgagtggtagagacacaaaagcattttatttagtagaaaagaaactctaaagattatggtatgttaccctgtggagcattagccagccttgtacctaatctaacaaacttattttaacaatcctttattatattgcttatatctatccagatttgtaaattctctttgaactgatcttaccatcttgatggtttcttcatttttaaaatgtgtttgacagtatcttgataaatatttcttctaattcatatgagtcatgctttaatctttattgaaaattatttcttaacaccagtgacatcaacaatagaactcaatggacttttgtatattgttcataacatcaatgatcattactttcattttctttcaaactcaaggtcttcatgctcttacagaggacacctattctctctcttcttctctccctcccaaggctcccacctctgaaattgttgtgcttcagatcctgtcttccagcccagtttctcctgacttcactttcttttctttctcactaatccccaggatatataacccagtctatcttgctgctaccctcagactctcgcatctttacccctttctacctttactgcatgtttcctgcaaggccttaatgaccaggtttttcaaatgttggcatcctctcttccaaatccaaagtcacgaggcctgttggactagggcagcagtttctattcttgtctttctatgtctgttctggagccaacacccattactgccaagtacccccacctaatatgtgactctgtccatatttcgccacttctcaaaatgcttcaacgatctttaacatgtctcaatgtcaaatttagatcctttgagggataagcaaggtttttgtataatgtagctaccaccaaactcaagtcttgccattccatttattggacaagctgtcacaacagcactaaactatgtgaagttcatgatgcaagccttcctttctttagttttctgaccttgattacattgctccctttgccttgtatgcacactcaacctcatactggtgtcccaccaccaatagtttcctggtaaaaagatgtctttcaacttttgcctgaaaggttatttatgccacccaggaggtgtaggtatctgtcccacatgagcatatggaatactgttcaatttgtaaacctcttacagcaatcattatgctgtattttatgtaggcatatatgtacccctccagactttgtggggttgttttaatctctttcacatttaacacctcattaaaaaatgtcaggtacgcagtaaggaagcattgaaaaaatgtgctaaattaagaaactagatgggaataaaaatgaatgagcacgggaagtactgagtgtacctgtgtataatttttgctgtgtaaaataccaccacaaaacttaattacttaaaaatacctttttaaatagttcataattctaagcagttctggtctgggccaactccatggatctctctggggctcttttatgtacctctggtcatctggtgaattagccggtagctaaatggtttaggatagctttttttcacatagtatagttgttaaaattgtatctgggtggagaatcgtttcttaagaaggtttacctctactgtctatggattattattctttagtagatcttccccacaaaaatatgaccattttaggatttaaaagaggagcaagggccgggcgtggtggctcacgcctgtaatcccagcactttgggaggccgaggcgggcggatcatgaggtcaggagatcgagaccatcctggctaacatggtgaaaccccgtctctactaaaaatacaaaaaaattagccgggcgtggtggcgggcgcctgtagtcccaactactcgggaggctgaggcaggagaacggcgtgaacccgggaggaggagcttgcagtgagctgagatcgtgccactgcactctagcctgggcgacaaagtgagactccacctcaaaagaaaaaaaaaaaaaaaaagaggagcaagagaacaagctcaaatgcctaaaaaaatttttttatatttctgcttgaataccatttggtaatattccatttgccagagtaagtcacagggccaagccagagtccatgtgagagggcacaaccaactgagcaatggtatggacatgagaagttaaattactgcaggccttcttatacaaaaactcatatattcacacataaaaactttttttcacctattaaattttatcttttggacttaattcataaataaaatctgatagtctcattcttttggtgctgtttataagaaaaacattgctatcaaatatgatatctaatatatgcacattcatgtctaccatcttaatatatgttttcattttaccctgcttttttatttttagtctttttctgcctttaaaacaatgtattgacttgtacatatttatctgctattggcctgagaaatacatactttatttgtactattttagaagttatctttaaaattataacttattaaattgaaaaactgtgcaaaattaagaactatctcaaccatcctccaaataaatcaaagctgtttatgaatacttaactcccccgacctttcaagcattacatgttattgttgcttaatattttagttttgttttatattcccagatttgccatctttcttactactttttacagtgtttgctctattcatctacatttattaaattctttgcttaccattctttcattttttgttgctttttttttaatgacaactttattgagatacaatcacatatcaaaacccagctgttcaggaggttgagacagggaggattgcttgaggccaggagtttgagactgacctcaaacatagcaagaccgtatctcttaaaaaaaataataaataaataaaaataataacaataaaataattagctgggcatggagatctgagttacttcggaggctaagatgagaggatttcttgagtccaggagttcaaggctgcagtgagccaaaaatcacaacactgcatttcagcctgggtgacagagcatgactctgaatctaaaattaaataaataatcacataccacaaattttactctttaaagtgcataattcagtaactttttagcatattcatatatacgtgcaatgatcaccactatttaattttagaatacttttggagagaaagtggagcaagatgaccaaacagaagactccactgattatcctccccaaaggaacaccaaattgaacaactaaccacacaagaaaaaggaccttcatgagaaccaaaaattaggtgagtgatcacagtacctgatgttaacttcatattactgaaagaagcactacagcgggtaggaaacacagtcttgaattgctgacatcaccccaccccatcccctcgcagaggccacatggcatggggagagcatctatgtgcttggggaagggagcacaaagggattgtgggctttgcattagaactcagtgctgccctgtcacagtagaaagcaacactaggcagaactcagccagcgcccatgaaggaaacatttagacaagctctacccagagggtaatcatctatcccagtaatcagaatctaaattctggtaagcccaccccctgcaggctaaagtgctctggggtcctaaacaaaattgaaacgcaggctaggccacaagatctacaattcctgggcaagtgctggtgctttactgggcttggaatcagtggacttggggggcaggtgatccagtgaaattccacccagtgtgaccaaaagagtgcttgtgccacccctcccccaacctcaggtggtacagctcagttctgggagaaactccttccttctgcctgaggagaggagaggagaggggagattaaagagggctttgtcttgcaacttggatactagttcagccacaaaaggatcaggcatcaggcagattcctgagcccccatttcaggccctagctgctgatgacatttctagacacaccctgagtcaggaaagaacccactactttgaagggaaaaacccagttctagcaggattcatcacctgctgactaaagagcctttgggccctgaataatgagtagtggcacaaaggcagtacttgccgtaggccttgggtgagactcagagatggtcaggcttcacgtaggagactcagtgcattcccaactgtgctggctaggggaggaactcctgcttgagggttaaacagaattctgaattttacagagaatagcttttttcatatattttcctgtctttggggatgaggttgaggagaactgggagtgattaaaagtatgtctaggtacatggttctatatttcatttatttctcccctgctctttaatttttagcctatagaggtagtattccaactataattctccttcagctgaatgattcatggcttatatctgggctcaaacttacagattattgtcatcaaaatgatttatgaatagttgcagataagatggtggcaacaatttcatattacatccagcttgagaaacccaaaaagaagtagaataaggctgatctattcaactttacatgatgattcttgtcacctaatcaatttgtacatttcattccaaattatttactgatacttgattagatagttttatcagtgtttttcagaagctaaaaagcagtataatagatgtaccagcaattgaataatttcattttaatattcattgttgtgcttttttattcatctattggaaacacatcatagagttacaataagaacatggtaatcacctctcagaagtaaacatcttactctttaagcccttgttccatattctttcactcagtctcttaacaattgattgctgttcatatctcaagcttggtcctctacgctggaatataaacattccgatgcataatcagcatcacaaattggtgtcccaagcatttgcctttggtagctcaagtcttttctcaacacatcgatcagagtgacactgtttatgtttatatcacattatgttatatcacataatgtcactggcttgcacaaaattctccaatgttttcccatctctcattgggtttctggaataaaagcccaattcctcacaatggttgcaaattcttcaacatctgggccctggatatgtctctttgcttttgtttgaacatgccagccacacttcagcttcagggccttgtattgtgtcttccttctgctggaaaactctccagatacctgaatggctcacccactaacctctttcaagtatttgctcagatgtcagatgtcacaataaaacaaattgtccctaaactcccctttctcatttctgacttatttgtttttacatagcatttatgaaactctgatatgatgtacatttgttaatagtctatctccctgcctcattttgcaagggccatatgtgtaaatagtcacggctatattcctaaccatcaatcacaacaaagccaatcaaattgatatttgctgattgaatcaatcaatgtttctgtatataagttgctgtgaatattttccattgtactgggaccagtattgtacattctatctatcttttccattccatactcatctagaatcctgagctttagaaaactgactctttaggggtaaaaagatggtgacatttaccctttatattaaatcctcactctctttgcatcatttaggaaagatcattaaataaataatccatgtttcctgtctctttattttccttgtatatatatcttgtgcagacattactgaaacttggtcaagtgaagtggaatgagcactgggctcagagtgaggagttacaatccagttctgccataaacacatgaccctgtttaggtcactaaagattactattaagaagcttagactttggaaaaatatttttgttggttaatgcattaaatgaaacattgtatgataaaacacctgtagtcccagctatgagggaggctgaggcaggagaattgcttgagcccaggagttcaagaccagcctggggcaacatagcgagagcccacctcaaaacaaaacaaaacaaaacaaaacaaattgtatgataaaacataattgcagcttatgttaatatcatgaattactcaacttctaaaatgctttcacaagctttattttgatttacacaagggccttgagagtcatctttaacattatgctttattagtttaacattatgctttattagcactttttttaagttgggtctgctagcaacaaattctcttacgtttggtttggttgggtctggttttgtgtttttgttgctgttgtttttgttgtttgcttggttgttttaaatgggactgtctctatttcacttccatttaaaaaatagcgttgctagatgtaggattctttgttgacatgtttttcccctctgaaccatttgattacaattattccactgttttctggtctccattgtttctaatgagaagtaaattgttaatgttattttgagttcccttgtaagtgaccagccgtttccctcttattacttttaatatttcatttttgtctttggctttcagcatttctcctatgatgcatttctttaaggatctcttgatgtacatccaacctgaagctcactgagcttcccagatgtgttgattgatatttcaatacattttggaacttttcagccattattaaatatttttctgctctttcttctctcctctccccttggtactcccataatatgcatgttgatgcacataatggtgtctcacacttctctgatattctgttcgtttttctgttttttctttgtcctttgaataacataatcttcactaatctagtctcaggtttgctcattctttcttcagccactttaaatctgttactgatttcctctattaattttcttaattttattgattatattttttcaatgccagattttgatttggttcttttaaaataatttccatctatttcatgttattttttatttgatgcaacattttcattatatctttatttctataattatggcttattttaggtatttgaaagtatttataaatgaatattttgagttcattgtgaaatctgttacaatctatttgctcttataggcagtttctgttgcctgcttttctttccagtatatgggtcataatttcttatttctttgcacatctcataatttttaatgaaaattggaaattttagataatatattatgcaactcacagggctaattctccactccagggcttgttattgctatttgtttatttgtttagtaactggctagattattttagtgaaatcgatttcatccttctccagcttgccaactgtgtgaagcctccaatgttaatcctcaggaggggcagtattgggcatgcccatagtcaccctggggtgacagtggattggttgggctctttgactgtcttttttctagattaacccaggatgtttagctccactaacttacaggtgattgctctctagttttaacaaagctttgggaacataaattgctccagggacttagccaatcttatttaagttcttttgaaagaataattcctgaggttagtttttcaggtgttttctgacccccaaaaggttcatttcaactgtctctttctctagatctctctgggaaactagccagtctatactttagcctatacctccattaaatctaccaatctcttcccagttgctatttaccacaaactttcttgcgtttaagagctttcttagcctggaacttttccacactccattgcagtttctttgggaagagatttagagctttctgttttatggcgtatttctcattctaagggtaaaatatttctagagctgggatatttctagagccaaatttctagagctgggaaaggaacaatggctcagtctctctacattacaatcccactttgtgagttgaatccttggttgggggggcggaagtagcctcaggtcttcttgacttgtatttcccagcaggaaatctttgccttaaaagctagagagcagcactttgggagtccggggcgggcagatcacgaggtcaggagtttgagaacagctgggccaacatggtgaaactccgtctctcctaaagatacaaaacattagctgggcgtagtggtgcgtgcctgttaatctcagctacttgggaggctgaggcaggagaatcgcttgaatccgggaggcgggggttgcagagagccgagatcgcgccattgtactccagcctgagcaacagagccggactccatagcaaaagcaaacaaacaaacaaacaaaaccaccagagaacaaggctgataggggtccaagtcttcttggtggcatttgcctaaagtagaggcacatcctatgtaggggctgggcaaaagatggaaactctcacctctcagctgctgtagtagtatcaacaggtatctgggggaaggatgagaaatgctaacatcctgcctttctcaggaagatagtcctctgactagcatctagaggatggagggaggaagctctgtttctttggctggccaaggctagagtgcaatttctatcttgttgaactagcaggaggtagggaaggagtgagtcttggttcaaataccatagactctcactgctcttgtcaatttttagtagattttctggactaaatgtttatttgattcctgtatgccttcaggactatttctagaaactttaaatggtggtcgttactggtttttgtaattttaatctgtctccctgacgagtagggctacagaattcctcatgctgtcacgccagatgtcacctgctataattacattttgaaagcacaaaaatgatgttctttaacttagactggcatataattaatacaattaaggccatatatttaaatatatgaaagcatatgagatattggtgctctttttctattatgtttaataaggacaaactgtgtgtcatgcgaaaccttttttatgtttactttatttacttaagcattcatttgggtaaaagttcttgagtcctgggaactgttcaaggtgcttggaaaatatatgcttgtttaaactacatgtaccctatgaggtatacatagttcgtggtgaggctagggttgaacatagagtctgacttcaaagcttcagctttaaaccactacattgcactaagtacgcacatgtgatttcatatatggaatgaatagaaggtgagtaactacttttttagagaaaagttatgattcagacacttcttgattaggtaagcacttgccaagttgagcatccatgttctcaactgtgaaataacaagaatacctacttaatcacgcagttgggctgattaaatgagatcatgtgtattaagtacttaacaaaatgcctagtaatatctattggttatcttaccttacctttaaaataatattttgctatttgtttttatttgtttacttttttggtgaacattattatagtctgtcctttcatatttgccataacttagaagagatcatgctctaatgaaagactcagaacctaaaggaaaggtgactccttaaaatatcagtcactgcacatcagagtctcatcttggtgataaccatttaacaaaaaaacaatgaataaggaatgtagaaaaatacataatgctgacatattgcaagggaaaaaacaaatttctcatattgctagatatagagactggagtaaaagacccctgctgcctaggttttgctttcataggatctgtgttcttctaaattgttagctacattatcctgttgattcccaatgacctgtttctcttgtccaaaacacacagggatctagtttggtttttctatactggcagttttcagagtggtctgtaaaccagcagcatccacatcacttgagaacttgtcagaaatacaaacatcttgaggcagaaattccagcaagtgggcaatattctttaacacatctttcaggtaattatgatgaagtctatatttgagaacccactatcttagacaattaacacttcttccaccgggcagagctttttattaatgaattactgtcaaggtctttggtgggacctcctatgcatcaaacacccagttgtggccactggaatagcttgctgctgctgtggtgaaaaatgagctaatttaccattgccagaattccagcagaattaaatcagatgacttgtttccagcccaaataacaacacacattatcatccagcatttaggagttgacctttatcctgcactatagattccacacttacaagctttcttatgtttcttgaaatagctttgttagctactgaccttggatttggctcaggctgttccctctgtgtaaaatttttttcttcctctctttacctagttaacactgactttctcttcagatctcaatgtcagcttcaattccttgagtgtggcattttctgaatccatatttgaaattaggttttctcttcttccctcctcgtctcctctcctctcctctcctctcttctttcctctcctctcctctcccctcctctcctctcctctcttcccctcctctcccctcctctcttcccctcccctcccctcccctctactcttttcctctcccctcccctctactcttttcctctcccctcccctctccttcccttccccctcattccctccctctcccttccctccttccttccttctttcttccctccctccctcccttccttccttctgtccatccatattacagaattgctattgaagtttgcaattatgctttcctttatgaagtatttggattcagttctgtcgcccttgaaagactgtaaattccatgagggcgaagagtgaacctgttttgttcacaaatgcaccctcaattgggaccatcgacaaatacttgtagacatataaataaaagcaaagttccagtttatcaatattttgtgatatctagtagtttatttatgcccaggtgaagaatatcatttagtttatgatatttctattggaaaaaatattcattgatgtcttactgtgtgtctggcattcttttagtgctggtgatggagcagcaaatacagcagacaaaattccagctctcatggagcttatattctaattttaatcaaagaattgtcagcaaagctatgaaactacattgctgaaaattccacttgtaacttttatagcagaattttggatacttttaatgacaaactaagttaaagaaactataatgcactatgtagaactacagaaattatggcagttcttgaatttagaatgccttgttgcaaaaattattctgaagcaaacaaggggaattggtctccatcatacatttcaaattttaaaaaagtgtctcaaatgataacagtggacctcagcagaaactctagatttaaatttcaaaaataaattatgtaataatgttatgattgatattaataaataataatattatgaataatagttcatggcaatgggatgctgatggtaggctgttatgagagagttgaaagttaatgggatcaagtctttgattcagttagcaaatttaatatatatatttttattgatacataacattggtatatatgggatatgatatggtttggctgcgtcctcacttaaatctcatcttgaattgtaactcctacaattcccatatgtcatgggaaggactcaatgggaggtaattgaatcataggggcggatctttctcatgctgttctcgcaatagtgaataagtctcacaagattttataaagaggagttcccccgcacaagctctctctctcttttggcctgctgccatccatgtaagacatgcctttcaccttccaccgtgattgtgaggcctccccagccatgtggaactgtaagtccattaaacttttttcttttgtaaattgcccactctcaggtatgtctttatcaacagtgtgagaacaaactaatacagggtacatgtgatattttattacatgtgtagaatgtgtaacaatcaagtcagggtatttagaatatttattacaagagtttttttatttctatatgttgaaaatatttcatatcttttattctaactattttgtaatacacagtagattgttgctaactagagtaaccctactctgctattgcacattaaaacttattccttctaactatacgtttgtacccattacccaacctcttttcatcccccccacccacacacccttttcagctcctggttactatcattctactctctacctacataagattaacttttttagcacctaaatatgagtgagatgtgataaatttgtctttctggccaagtgcggtgggtcacacctgtaattccagcactttgggaggccgagatgagtggatagcctgagctcagaagttcgagaccagcctgggcaacatggtgagaccttgtctctactaaaaatacaaaaaaaattggctgggcgagatggcccttgcctgtagtcccacctattcatggggactgaggcatgagaatcacttgagcctaggaagcagaggttgtagtgagctgagatggggccacttaactccagcctgggtgagagagtgagactctgtctcaacaaaaataaataaataaataaataaattgtctttctatgcctggcttatttcacttaatgtccaattccatccatgttgctgcacatgacagaatttaattctttttatggctgaatagtatttcattgtatatctatacaatattttctttatccgttcatccattgatggacacttaggttgattccataactttgctattgtgagtggtgctgcaataaacatgagggtgcaggtatccctttgatatactgacttatttcctttggatacatagtaatgaaattgatggatcatatgatagttcagtttttagtttttttgagaaatcttcacactgttttccatagtggctataataatttacattcccaccaacagtgtataatagttccctgttctctgcatcctttctaacagttgtccctttttttgtctttttgataaaggcttttctaagtgggtaaggtaacatctcaatgtggttttgatttgcatttcactgatgtttagttatgttgatcatttttcatattcctgttgcctatttgtatatcttctttgttgaaaagtctattcaaagcatttgcacactttttaataagactatttgctatttattcagttagctgttgagtgggttgagttctttgtatcttctggttattagtcccttgttggatgaatagtttgcaagtgttttcttccattaaatattttgtctcttcactttttgtttcctttattgtgcaggtttttagtttgatattattccatttgtctattttcagttttgttgtctgtgatttttgagatttttgccataaaatacttgcttatactgatggttgggaggccttcccctgtgttttcttctagtaattgcataatttcaggtcttacatttaagtcttgaatccatttttgaagttttttttttttttttttttttgtatatgtcaggagttagggctttagtttcattcctctgcagatggatatccaggtttcccaacagcatttattgaagagggtatcctttctccaatgtatgttcttggtgctttggttttaaatcactaggctataaatacgtagatatattcttgagttctttacttgttcccttagtctatgtatctgttttctaccaatatcatgctgttaatatagccttgcaatatattttaaactgttcctccaactttgctcttttggctcaggattccttcggatgcttaggatctttttttttttcctgtattgttccatacaatttcagaatttttttttatttctgtgaaaaatgtcattggtattttgctaagaattgcagttaatctatgtattgctttggataatatgctcattttaagcatattaatttttccaatccatgagcaaaggaagtctttccatttctttgtttcctctttaatttctttcatcagtgttttgtagattcccttgttgagatcattcaccttcttgattaaatttatttctaggtattttatattttggggtaactattgtaaatggaattaccttcttgatttagttctccagtggctcattattgaggtacagaaatacaacttatttttgtatattgattttgtattctgcaactttactgaatttatttatcagatctaagacttttttaatggagtctttaggtttttctaaacataatttaatatcatctgcaaataggaacaatttgactttccgttttgcaatttggatgtcttttgtctttctttcttttcctaattactttggctggatcttctatgtaggatataagtagcaaaagtgggcaaagttgtcttgttccagctcttagagaaaaggcttctagcttttcctcactcagtataatcttaactctgggcctatcatatgtggcctttattatattgaggtatgttccttttatgcttagtttgttgagagtttttattatgaaggaatattgaattttatcaaatgctttttctgtgtctattgagatgatcatatggtttttttctgattcaaatatttggttgctttatggtgtctcataggtcatggatattttcttcatttctttttagtctttttttctttgtttgtctgcctgttattttaaaaggctctgtcttccagttctattttcttcccttctgcttgagatagtctatcattaaggctcttggttgtattttttatttcattgattgaattcttcagttctggaatttctgttgtttgtttgttttgtatgatatatctgtctatggtgaattcctcacttataccatcagttgtttttctaatttctttgtattgctcatctgtgtcttcttgtatctcactatgcttctttattgtcattattttaaattctttttcaggcatttcataattttaattgacatttgttgctggagaattaatgttttcctttagcgatgtcatatttctgtttcatgtttcttgtgtcctcacattgatatctgcacatattgtgcaactgtcacttctttcaagtttttggattcatttttgtaagggaagactttttcttgagattatatccaaggtatttgttcagtggggcactttagctttgattctggatacatgcagtagtgtatctctgtgtgatttcttcagctgtaaacagcaacagtagtgtctgtattttcctcagtgacttagggagtggttattagtaaaggctgtggcaaggctttgctggggacaaagataacaggtgggccagtcctctaggcccagtggtggcagtggaaggctgagagtgcctgtctgcaagctcctgggcagcatatacagatgcgggtattagcgggttcaattttggaacctccaggtggctcaccaagagtggtgggccaggctgctgggtgtgtccttgcacccctgggcaaggtgcattatgtgggcaaaggcagtaatggtggtgggtgcccaggcaacaggcactgatgttagcagtggctgtaatgggctaggcaggccagccccagtaccccaggtggcacttatggtgggtacccacagtggtggtggtggcaggtgggtaggcttgtcctcaggcttgttggaggagtacatagatgtcagctgaggtagatatggtggggcaatccccaggcctccagaagatgtgctttggtgctagaaacaagtgttttgggcctgttgtgaggcttcctggtggtgcactttcactgacagggtagcagatggggcagaacaatcctcaggtccctggtggcatgcttgggcattggggaatcggtaatgcagctggcaagtaattatctgttctttaggaggtgagctgagctgctgatctcgtgggcaaacacacatatatataatttacacagttacattgactttaattaacaatgtagaatattttatttctgtaggaactgattatcctagaattgtttctttcagctctgttgcacattgcttaggtattagcttccatgagtagagtcaaagatttaaaaaaaaactgcttagaggaatactaggcctactgtttgccatatgactgtgcttggcctactctgattactcctaaatctatacaacagctgttcacagttcctagcatgaggcatcaacagaaatgaagtggagcacccctcattagctaaagcttcttgtacctcactggcattttttccctcttcctttcttctgtttgaaagtgacttattgttcttaattagttcagatatattatgtggcatcccagtcttgccaagtaaaaggaattgtccaaatcaatgaatgactccttcttcatttaaactaaatatatacatatatttttgagacagtctcactctgtcactcaggctggagtgtagtgtctcagtcagagctcactgcagcctcaacctcccaggctcatgcaatcctcccatctcagcctccagagtagctggaactacagatgtgtgccaccatgctcagttaattcatttttttatttttggtagacctgaggcatcactatgttgcctaggcaggtcctgaaatcctggcctcaacttatctttccacttttgtctcccaaaatactgggattactggcatgagccaccacgtctggcccttaaaaagattttttacaaattatcagggtaattttatctttcccaagtgagagccagttttggttttttaaacttgtgagattggagagttggcactgttggtttgttagtggttattaactaagttggatgtaaccacaagaagtataaaagggagaagtgatgataagacagaaggaaggaaggaagggaggaagcaaggtgggaataagggagggaaaacaagagaaagagaaagggagttaaagagggggagtgagagagagagaaagaagtggaaacccctgcccacactcctgtcacaccaagccctttagggagattttgtaagctttaatgtgcaacctcctcttactgtaactccttttttttttattattattattattacaaataaaaacttggcatgtctttgaagttttaactgcatcaaagacttgctcccattaatttaaaattactttttctaaaagcctgtctactgttagcagttcatgaaaaggatgccctgtttgctgtctcctgagttctcaaagaagaacctctaattgatctttctgcatttttgcatcaaataatactgagtggaaaaaaatgccctttaactcataaagtggccacgtctatgagagactcttgaggcagatagaactgaagaaaggggtctgactacactccagggttctggatttagaagaaaacgaaattgagaaaatgaatttatatttgaaatcaacaaatactaactcttcattgatttctatggcagtcagaatgcagcaaaatatttttgaaaataaactagcattttttaaatctttaaaaattttaatgttgtaaaatagtatattaattgttagacttgcaggtttaaaggagttgaaaaacattttaatttaattccctctaagtccacacttcatttattaaacagatcaatttgtttcattttttttctattcttcccatataaaatgctcataatctgtttgtattatatcctttacattgagaagttttatacatattttaattttattctcccatcagcaagtcttgttttccttgtataagtcaaatagtggacatgaacagcttgaaaacaacccataatattgttgaagagtatatggaaatagtctattttggagaaaaaaataaactcatttttcagaaaacaaccaattaaattatgttatttaggtctgacattttatttagtaaaattaatgttaaaaaaaacccttggttgcctaacaagttgaataaattaaattgagttaattgaattaagttgaattaattaaattcaattgttttacttttttacatctttaattttccaaaatgtactggatcacttgttttattcttttataaaatatgaaattaagatgaagcatggtgatgctacatattaggaaattatattcctgaatgtcacctccttggtaatatttggcaaaattctgtgaataacaaatctaagagaataaatattctccaatcaataaccaaggattcagatgataaacaaaattcgttttatgttattagagcagcctgcctatactaagcccaaaacaaccacttaatcttttaaaacaagggttataaaattatagctagttaggccagcctgtggcttttttttgctaacaaacgccaatagaatagttatccaaataagtgaattagacacaatccatctctaataggttccttctctaatattcaattattatggcttcatccaacatgaagtaacacaaaccatatctggtcttttctgtgtgaaatctgacaataaagctcttctgatattatctaactgaggtgatacattataacgacacccaggagaccacactgcaagtgctgggaaaggaagcacggcgttgtgaaactgccaaaaccttgtgggtcattttgttcaaatatctcatcttatttatgtatttatctattgatttttaagatgccgtatccctctgtcacccacgctggagtgcagtgatgcaatcttggctcactgcaccctccactgcctcatggtctcaagttatccttccacctcagcctcccaagcagctgggaccacaggcaaatgccaccatgccaggttaattttttgtatttttggtagagacagggcttctccatgttacccaggctgggctcaaactcctgagctcaagcgatccatctggctcggcctcccaaagtgctggaattacaggcatgagccaccccgcctggcccatatgtctcattttagagacaataaagctaagggcctcggggttgtccttgggttagcccaaggacactagattttagcacaagttgatcaagaatagtgtccggctaaggttggaaactctatgtcagcctctgattggatgaaaataagcgcgaatgacagcaagaacttacgggctctagaaggattctgaacccagaaacagcaaggggacaagaaacaaatagtgaatgtgcttaaggagtcttgctaacaaaattgtatggagtttccctcttagctttgtgaaatttggttcattttgaaggttcatgtgttagtttcatggagatgattctgctggctctaaacaagccatgggagagccaaggcacaccagctctcctgatgtgggttagcaatgtgatccttgtttttccagccagcttattgataccttctatctcatggaaaagccttccttgctgccctaactgacctacataaagccatggaaataattgattaggaacaaaaggaccttagacccatctgtattcagtaaaagcttccactgaaggtgagcgcatatctaagaggtttaatgtactggttaagagcataggatgttgggacagagcatcagggtttaaatcgcaactttgcctctagcagtttgatgttgggcaagttgtcaaacctagctttggttctttaaactcatctataacactgaagtaagtaataatagggctgtgatgagtgctaaataagtcagcacatataaaatgcttacaatagtgccagcacacattaaatattgcccatgtgatttttctggaatttgttttaattccagattttcatctaagaaagtttttctatttggctttatatctacgcaaataaaagtttgaaaaggcagctcagtctctataaaaaattttgtaaaagtgaatatgggaataagctgatttggcttataataaaaatcaaatgaatccaaatgtaaattttggggttgttaatgcaaagtgaagtcctcttgggtccaaatataaacagactgggatttgtttaaggatttgaaaacactgaaaataaggaaatgtgaaaattagcatctttacacacctattgcatgctacaaactattttaagtacttgaaaatcagaatcaataaacaacttgagtgcactttataactgtgagagaagaaaatcaagttgcaaagtattagattcattgctcctccagttaaagttaaaaataggcaaaattaatactttttatagttgtataccaaattgctaaaatatatttaataatccatgaaagcaattatcataaaaactagtatagtggttatttaaagggatgaggaaaagggtatgtcacggaggaggaataaatatggagcaagagttcagaatttctggcaagatttaatttctcatctttggtagtggctaaatgtgtatttgctttgtgattatgcagtatactctacatttacatttattctcttttgtagtgttatcacattttagaataaaacgtaaaaataatgacattaaacacttaagagccaaacatttgcaaaattgccactatttccagagactttatactgccttgttagaaatgctaatagtcatggtaatgaggtttgattcaacctgaatatcaaatccccatctcagctacaaatgcctcactccacggacaatttgtagatgagacatacatagcaaattggtcctcagtagatatacctgacaacaagtttaataaagatggcaatgtttcaatactaaatgaggaatgaaagttgtcagaatcatggtgtcttataaagaagaatgatacacaaagcatttcatcatccttgtcatgtcttaccaaaataatttctgccttttaaactaagcaattgagttggaagcaatgtttcaacttgtgggcttatattaatagaagtcaacatagcaatgggataaaacatacttagtgatgagtcaaaaagtgaaactggtttggcaaattctacctcatctcagtggcaaataattaacttataatgaaaactgaaaccaattacattcagtctaaagggaaactgaaggtcaattactcaagacatcaattatctataaagaagtttatggatatcatcaactattgatttttacaaagtgttaaagacactcatgagtcatttactgagtactaaattatatttatcaattctcaaagttcccagtgattgcagatgaaatttataattgagtgccaggttgtattttccacaattggctacaacattatctccatccatgcatgctcttctagaaccttgcctttgttccatcctggagtagaacctatttctttccgcatgaaactgagtggacttatgaaccatttgtaatcaataaaatgtaatatatataatactgtatgatttttgaggctagataataaaagataatgtcacttgtcttatttgctggaatactcattcttgaagctttcagaggctacagaaatcattctatagccatgagggtgccatgttgtgaggaagcccaaactatctcacatacaaagagcacatggtaagggcacgagactaatacaaagaaagtgagatgcccaggcaactgccaggtactttagtcccccaaatttgaatgttccagccataactaccatctgaccataaccatgattcaaaacaaaagtcctttccaaatttcttacccacaaagttcatgagaaataatataatatttgttgtcttttcgctaagatttgtgttgatctgtcacatggcaatataaatgaccaactgagctattttctcaaacttcagggctatttgttctcattgaaagattatatacaatactcaggaaacttcatataatcatctatgtgatgtttctaattgattagctcaagatatttgatcaacccttggaaaacttcaatatcatatgttgaattcctgaggtgtccacttaggaacattttgataaatccatgaattcagactcttggtccacaatatgtgatctgaggtggcatcaaaaaatggtagagtaaggacctctaaaattctctcctccataaaagcaatgagagcactagtaaaaattattagaattaaaattttcaaaactatagaaatcaatcaatgcttgcagaaactccagggatatttattcaagaacaatggctgaatattggtacaaataagcagttttgcagtactgtagcactattcccacatcctaatcatcataaaaactaacattgcatcctggaagccactggtcgggacagaatggatttggaattcctttaaaattgcattcctcgaggattattgttatttgacctgtctagtgactcactggaatacactacttgcaaggatatctttatttgactgtgacttggaacttgcctaatgtgaatagccttttccccaggattgtttgttgaaacaatcagagacaactgtataacaccacagctgcctgaggcaatggatggtagactgagaaaacaataggcaaagaaaccttaaaaggggaagtagggaaatagtacactcacagggagctttgaaaagctctgatacattcctgggaatcctgaaggacaaccacatacagaagtctatgtgtatgcacaggactctgtgcatgctcagaaaagacctgaaaacctaagttctaaccttgaggctctgtgtaaacaggaagtgaaggctaaggtagagttgtaacttcttgaatgtagaaagtatacccaacacacacacaaaacccctcaacaaagactgtggaagacattagtttcaggtagttaaggaaatctctgtccaatcattaaacgaccattaagataactgagcagagacttcaatggacacacataacaaagaatatagactagaagaattttaaattttaaagttttattttgatagctttaatagatatctagtaatcatttctagttatgtcacctttcttattattcttctttctattgtaaatggtatgttttttctgtgaatattttcctggctgttcttttaacattaatctgtaaattattctaaaaatgctaatgatttttttatatttaaaaatagtttttcatttatttttctatgtttcctaggcaaataatcttatgactggagagtaataccaaatttagtccccctttcataaatatataacttcttttttatcttttctttatgtgcattgctagtttgatagttcagggtataaacttttatgtgtctttaatgaatcgactttatccatattcagatcttatctatgatttacttgttttctctacttatttcccattagcagacaaatcaagtttccatctataatttttgtttctgtcaatttctcccttcatttctagattttagtttagtgtatttgaatacaatgttatttaatgcattaaaaatatcatgaaggatatttccactgtataggtgtttatatcctttccattataatttgagccttttggtcttattaaacaggtttggattgagttccaatcatccagtactaacgttggaactgcagtgttatttgttgttgttgttgttgtttttctttttaaaataatttttttgcatttatctatatttttgcactttactttctacatttatacttacttttttttaagagtgtcatatttaagatacagtgaaatgtgatcgttgacttagtttcagtcacttatatcaatggtaaatttaggaacatgctagcagtgtttattttaatattcttttatttaaaatggtatccttcactattttctctgtcttctcacgttgctacattggctttcttcccttcctacatctccttcttcctctgccacagtcaaaacttagaatgcttttattctttatttatttttcatgcatttgattgtatgactgtaaataatctaaaactgtaaatagtcttgatttcataacttaaaaataagataatatctataaataatttttcaaattggctgctggatttttgcctcaattcataattttgaaaagctctgatatgttcctgggaatcctgaaggacaaccacatacagaagtctatgtgtatgcacaggactgtgtgcatactcagaaaagacctgaaaacctaagttctaacgttgaggctcttgagcttacattataaaagtttcctttaaggattattgcatttacattacattctgccagtaaacttctcattgcttttgcccataaatcatatctaactgaatccatgctctccattggttacatatatttgaccaatttatcatttgtgcattctgtttgttcacatcttggttagtagcatcacaatttctcagatggttgctggtggtcaggtgaaataaagtgcaggtggaggcaaagtgttgagacctcaagtgactgaagcacttactatgacaactatagtgatgatggagattataggtcacctggcttctttttatggtcctagacggcacaaagagaagaggaaattgaaatacatgaatgtacaactgagaatgttggtgaacaatcagaaagccttgatggcagctataaaagaattcatcatctcctgcaattgtggagcaaatatgtctgaagacttatcctgagattaggtcttgctactctgcaacccttcttgctactctgcaacccttatcttatctttcacatgttaaagctaccaaatttcttacactaaaattaggcctctggagaagaaagactggttcactggtatacgagaagttgatttatttgggccaaatatatgatttccttaatttccactcactctgtcctgttggctaaggaaacccttttttctcttctgagaaatccactcatcctctgcataaaagacttatgttgagtgcaagacttggacatatggggcaatttctcataagagtatatcagttgttttcaatacacacttccatcatgctttatcaccttcagtgccaccatgagatttagatgccaacatagctcagacgcatgaaacaccagtcctgatctgcagatagagcagtctaggtgccaaaggagttacagaatttcaccaatctgtactggccaggatctgggtatatatatctatgacaatgaaatctaagggtattaggctaggaaaaaaaagaaagaaagccttgagtaagataaagtattgacatgagtactttcacctagaatttgaaattaaatttattgacttgaaaacttataaatataactcacattctgataagtcagccacctgtagttcgaacaaaatgaggttgaaatgctataacatccttggcatcctaaagaaatctaagacctcaggtagatgggagtgttgatgaagatttgttatgtgcaacttgctcttttcctagggcagccaacaagattatatgcctaagaaagactgaggggtttcctgggacatgagattttcagtggcaactccaggatagtcccttgaaaactgtgatgtttggtcccttaaccttctactctctcactctacccttgagaggcctgcaaaatactccttcaggaggtttaaagaataaaatctgctgtagggggtacagggggagggagagcatcaggaagaatagctaatggaggctgggtttaatacctaggtgatgggttgatctgtgcagcaaactaccatggcacatgtttacctatgcaacaagcccaaatctgcacatcctgcacatgtaccccagaacttaaaagttgaagaaaaaaaatccactactgatcaagttctggctctcatctaagctactcagctacttgggccttatgatccataggacccactagaacttagatgtctgtggccagaagagatggttcatgacccccctggcaagcaccaacaggagaatcacactatacatttttggggctttagagtaaggccatctcatcttcaggtaacaaatattcttcagttgaaaagaaacttctagcttgttattgggcgccgacagactgaatccctgattatggaacatcaagtgattatgcagcctgaattacctgtcatgaactgagaattatttgattcactgaactgtaaaattagatgtgcacagctgcacttcattataaaagaagaatcatatttgtgagatcgtgactgagtaggcttggaaagtataactagaatggcatgaagtagatagctccattttacctctcctcttgctatgttgcccctccctctttccacatatattaagtcaagggaagctcatatgaccattagcagatgagaaaaaagctcaggcttggtttgtggatgaatgggcatggcatgctggcaccagccagaagtggacagctatctttcaacactatgcaggggtagccctcaaaaagtgttggtcaccacaggatctctcctttttatagttaaaaatcaagtctttgaggtagaagtgactcctttcaatattatatataaaatgcacataaataacttttgcttcctgtctcttatcaactttggactcagatgtttggaagtcccagtggccacgaagacaatgcttcctccaggcatatggtcatgggttctaatgaattaacagtctcctctccccaccaccaccttggacttcttgtgtcactgaaccaacaggcagaaaagcgaattactcttctgagtagagtggttgaagtccattacaaggtagaattcaggttgacattacatattgtgggcaagaaggagtatgcttgaaacccagagagttttctggtagtatgttagtacttcctttgcaaatagcgctagtcaatggaaaaccatggtaatctaagattcagattccacaagaataaaggattgagtcaccacacttgaaaaatatcccatccagccaaggttctggcataagtcaagaaaaacatagaatgactgaaggacaaaaactgctttaattaacagctatgtctcatgcatgcccagatgtaggagagactgcagtagtctccttcctgccagatctctgatgagtgcattgtatttaacatgaaaacctctatttggatctttgattttcacagaagtagtatggcaggaactcatctggatgctgttcgttctccttttaaacctgagtttaaaggctggatattgatggttatctcagctcttcgattacatctggttagggtatcctaagtggagttatcagtagctatagttcatgaattgtcaatgtttccagcacgtttaaattttcttgtcatcaaatttatttcacctaccttgtaactaattcagtatgttgccttggctagggtgtttgtcaacctatgaatagtatctctaaattcaggatttctacctagatttgcttcaacaaaaattaaaataactcagaacttttgtagcattgcttaaacattctcttcctagaaatcaaacccattttcagactagctagggaagagggagaaattgatgaactttttgtgaaatatagggttttaactgctgtgtttttagactttaagagccagatttgtatgaggtggttcccttaatggagctaatatttcttatggttttagtattttttgtttataaattcctactagttattgtttaaaattgaatttactcgttcttgcatcctctccgacgtgtaagcacaatacttattacccaactaggaagcaaaacatttgagtaaagatgcagctgaaatactgaaaatgcaaataagtgaaataaaagttgttaaagtttgtttttccccaaagaccttaagtcagctggctcttcttccagtttttaaaactattccttagcatacagaaaatattaccaattgatttcatgaaggtagtatagcgtgatctttaaatcatagcttattttgtaatttgtcattgggcagtatctcattgtttcacaactcgaccaaaaatatttaatactattttatgcatatcttgtagatgagataagcaagatttcaagaagttgagggatgttttaagactgtcagtatgtcaactcagaaattcttggtttcagacagaattctttattattacacaaccttgtattccaatttaacataatagatccattccttcattcttaaacttctcttcttttcctgattcctatgtcaccagactattctggttttctttctttccatctttctttcttccttctttctttctttctttctttctttctttctttctttctttctttctttctttctttctctctctctctctctctctttctttctttctttctttctttctttctttctttctttctttctttctttctgtctctctcttccttcctgcctttcttcttttttcttttctttttttgagatgggatcttgctctgtcacccaggcacaatctcattggcgccatcttggctcactgcaacctctgcctctgggtttaagcaattctcctgcctcagccaccccagtagctggaattacaggtggctgccactacatctggctaatttttgtatttttagtagagatgaggtttcaccatattggccaggctggtctcgaacttgtgacccaagtgatccacccccctcagccttccaaggtgctgggattacaggcatgagccactgcacccagcctcttctggttttcttttttcattctttgtctctttcttgttacttccctcacagattcctcttttttctttttctgtccctttaatgttaatgctctccaggattttgcctttaatctttatttattctcactgtgtaaactcttctgggccatctcatctaagccattatcttttagtttaaagaatatttttaattgacaagtattatatatatttattatatgcaatgtgttgttttgaaatatgcatgtattgtggaatggctaaatcaagctacttaatatatatgtacttcatattttgttaacagtgtcaggataaaactgctagatattaataaaaaataataaaccctattttcctgatatataatcttccccttatgctccacctgaatgtttcaccagaaacataccatacataaaagagatgaaacaaagagaagaaaatgtcaaattcttgttttgaatgctgaaacaacctcctgaaactcatgtcagggacaatagtctgaaaaatctaggctattgattagcacaagccagatattttacaacttcaaaaacaagacctaaaggcaacttagcatagagactatgacttaagcaatattgcataagacaattgataaacgacctgtggattccctgaatggaaaataaagtttcatttgatgggggtgagagggaatttcagagaggagggagagaccttcagcatgggtgagttcttaagaaggaattagggagactgctttctgactgaatcttggggtatggcctgaagaacagaaagtctggacaggaatgagggctttacaggggcagaagagacctgtttcttgctcccaggtcaagactaggttttagtgtctagatgacagtgattcatagaaatgttctccatgtcagcataatctatagagcaaaaacaagcaagacaggtacaggtagactcttccttctctcactctctggtctcctgatatttcagagaagtgtggaaaaggatgtcaatgctccccatgtcataacatgcatgccagaagacctaaataatctgagttttgtggatacagacataatatgaagatatgcaagatttctcaaagttgaagacaccttggcaaaaagcaccatgaatagaagcgtatggccaaaggccaggtgtgagaaacggtatcacagcaggtgccaatagaggaaagagtgaagctgccatttggctgaccaggtaaattgtttacactgataccaaacaagctctccaataaagaagatgtctcatcatggagaaagggagaaaacaatgctaaattatatgagattccttctaaaaggcctaaccgcctgcaggttggttaggtggctctgctgatcttgacttgctggcttatatgtctgggtgttggctagctgttgactgatctagtatgtactcagccggagtgaagtgggtgtcccagcctgttccatagctctcattctccaggagactagctcaggcatattctcataacactgatgtaagagcaagagaggaaccagaagctcatatgctgatttgtgatcctctgcaagcgtcacatttgctaacatcctttttgaccaaaacatctcatggctagactcagtattaagatgtggaaaaaatagactccagcacttcagggaaaataatggaacagtcacatgacacataggcaagtggtagtaaggaggctacagaaagtgaggggagattggaactcttaaagcactcaatctactaagggaaggaaagggaaaagggctgggaggatttgaaaggccgacccaaagtggtagtacataggtatttaattaagaaataagcagtaataaagaacagtgaaaatgttcagatgtagagatcaaagtattttaaatttccatctcccattagaaatctagacctagaggaaatcctcagaaccattttgttcactcctaattaaatatccattaagagaaaattcatatcctctgtctgcttcagactgtttagtgtttgagtggtcattgtccatttttccctaacatgaaagtatcattatttatttcctttaagcactttcttttctctgctaagctggagctataatcccacattgaatttaaaaaccacttccttttttgatcagctgcatcaattttttaaccagtctatccccagacatttctgtctgcaaaactttgatcgtttatgtaggcttacctaatatatcagtttccccctgaatatgttttagatataagaagaaaaatgaagctgagtgtactaataagaacctgttcactgtggcaaaaagttgaaagattgcattcattcttgccagacatgctcttcacataacctaggatcaaatgaacaaactagcagtctcattaccagggtgtttataaaacttgagatccactctggctcttggatctttctctgctgtctttatgcaaaagaaggcactcctcatcttgactgatataatattcccccaaattagggatcacctttcattaattaagagtgaaacattgacttaactttgtatattcagattccagtttacttacaggcatccgtgaacttcacgctgaattaccaatcctataacccaaatcctaaagaaaaatgaaggctgatgttatttttactggaggaatcgctttctgtagaacaattacttaattttgtgagcaccccttttctcatttttctggagtaaagtacctttgccatactttttttgtgtgtgtgtgaggcagggtcttgctttgtcacccatgctggagtgcagtggtgtgatcatgatcacagcctcaatctcccaggctcaagcaatcctcttgcctcaggctcccaagtagctgggaccataaggtacatgccactacaccaagctattactttatttttttagcaacagggcctcgctttgttgcccaggctggtcttgaattcctggcctcaagcaattttcctgcctcagcctcccaaaatgctgggattataggcatgtgctgccatgcttggcttactttcttctttcttcaagtcaagaccagtctgggcaataaagcaaggctctgtttctacaaaaaataaaattagccaggtgtggtggcatgtgcttgtgatcccagctacttaggaggctgaggcaagaggatcccttgctcctgggaggtagaggctgtagtgagctatgatcacaccactgaactccaatttagaaatgagtgtcctaaagaaaaaaaataaaaatcttttgcctaaggcagaaaatagacaattaaaaggataattgcaatttcatagaaaacatcctgtagtggagatttatctggatttttaaccaatggttttagttattagaaagagttagagaacctgtcctacttagtgtcagggtggaagcagacacagtgaagagggaatgatttctgaattgtgttttttaaagaataaatcaggtatagatagcatagtgaagaaaacccttatgcagtggcataagggttaaagagatcattcttgtttttattgttaatgtggttggctacatcgtgagaattgtgtgttttttgtttttttttttttagatggagtctcactctgtcacccaggctggagttcaatggtgcaatctctgctcactgcatcctctgcctcccggattcaagcaattctcctgcctcagcctcctaagtagctgagattacaggcacctgccaccacacccagctaatttttgtatttttagtagagatgggtttcaccatgttgtccagactgctcttggactcctgacctcaggtgatccacctgccttgacctcccaaagtgctgggattacaggcatgagccactgtgcccagcccactgatagagttttgaatattggacctcattgcatttctggaacaaataccatttggctgtggttcattattcctttactatcattgttcacttatatgttgatgggtttggattttctaatattttgttgggttttttttttctatcttcataagagatattggtatgtaggtttcttttcttaaattgtctttgtctgcttttggtgttgcagtaatgctggctaatactgagaagtgtttttcctcttctgtttcctggaatagaattggtgtcattttttccaaaatgtttgtaggatttgccagtgacactattggacctggagacttacttgtggggattttaaacaatagattacaattccttaacagtttagggcttaataggctatctatttcagtttgaatgagttttgaacattagtgattttgaggaattggtccatttcatctgagtttcaaatgtacgtatacagagttgtttgcagtagttcttcatctttttaaagcctgtgggtatttgtaatgtattttctcttttattcttggtattggtaatttatatcttccccctctgtttctgtcatttttcttagaaatttagccatcttattttttttttcaaacagacaactctttggtttgattttttttttctgtttttggattgtttgttagttttcaattttactaattttgttattttctttattatttcctcctttctttgagtttactttgctcttgtatggctaagcagtaggaagattagaagggaaaaatgataaattcatctctagtttggtggcattttaaattctagtattcttttctaatctgcctgctactaattatccttcaaagttctcaattccatgtatgctcctcagagttcttggctgtgttcaatgagagatacaagtagacttttatttgctactcaaacaccataagtggtgtttctgttcatgatgtgatttttctaaacactgaacagactaagccaagtcacagagtacctgaattcacatgataggaacattccaataaaagatagtatatattaaaactatttgcattgtatatttaacagttcagttctagactcagataactccaaataggacttttgtctgtttaaatattttacaagataataaaaaattatgagaaagtagaacaatttttattatgtattattttcttatgaaattattgtgaaaactgacagtaccccactagattccaaaaaatgccccctgtagggtagaactggcccattgaaaagccctgctctatatcactgctgtctagaactgtctacaatgatgatgttctgtttctgtaccatccaataatatagtagccactagccacattttgctgttgattatttgagatctgcctagcatgtctgaaggactaaatttttaatttaattttaattaatttaagtttaaatggccttatttggttggtggcttttgtaactgaaagcatatttagagatatgaggtgacatgtttgaatagcatagaaggcagacagagggaatagctatagtagatataggcagaacatggattttggatacaaaaagtactaacctgagatcctagcattgtcaattccaagctaataaaggtaaagataaattgtggaaatgctaaactatcttacaaatctgagccatgacagaaggccttctcaattctgtatttttgtaaatgtatcattgaccttaaacagagtactgtaactttgtctttattagttaatgtcttacttagctgagcacatcattcatatctgttaatatgattttgaatcttgaatgtgtcctccaaaggattagctattcttctagttttgtgtcaggcataaacttaatactttcattacttaatgcttttattcaagaaggttataaatttgttgaatttgaaacagacaggaatatattgttttgcaatagcatcagaagccttctttcttgagggccctgttcccttggacaatcccaaatcttccatttttcatcttgacctcaaggatgtcaaggaatttatcaccgaatactttgttgaaataaaaatacactagctctagacatagactgctacttctgttaaaaaagagaaatgagatatatttggtaggattcgttccaaagaggtaaatattatcccaattttataaatgagaaaactgagacacaacaagattattttgtctgcttaaggtaaaatagctaggaaatagtggaacaggatataaaaatcacgaatacttgactccaaaacctgtgatatttctgtgataggcagcctttaacatggcccccaatgatccaattaatggtgccaattaatgaatgatacctcctggtattcacagtcttgtgggatcccctgtccctgagtgacttgccttaaaataatagaatatcataacataatcaatttagatgcagacatgcaaagatgcatagtctaatttgacacttgaaaaaaaaactgaggttcacaggattgtcagaatttactcttgtaattaattatacccagtagctgaattggaatcaaatctagatttttacttttagattttgcattataaaataaaatgtaaaaaagccacccaaacaaataaattaacaaattgttagaaggtgaatagccttgcattcctcacctcggtaaaaagatagaacattgcccttcacctcagaagtcttctccatgtgtcccatcctcaaatactcatttctctgctaacttttgattttttagagatggtctcactctgtctcccaggctggagtgcagtggcacaatcttggctcactgcaacctctgcctcccaggttcaagttattctcctgcctcagcctccaaagtaggtgggactacaggcatgtgctaccaagcccagctaattttttgtatttttagtagaatcggggtttcagcatgttggccaggctggtctcgaactcctgacctcaagtgatccgtccacctcggcctcccaaaatgttgggattataggcgtgagccactgcgcctggcctgctctgctaacttttatattaaccacttccttgcatttctttatggttttagcactcaaacagtgcatccctagacagtatactttagtattgcctctaaaaaatttgtatcttttcttgtacctccttgatatcctgtaggtatattctattagaagccttgctgaatttggacaacaatcattaaaagttctataattgtcctaaaagttgtcaaaatttcaacttctagtatttaatctcaaataactaatcatgaatatttttaaaacatttagtctaaattgtactttctatttcttaatagtaaaaatttggaaatggcttaaaagttaaacagaaaaattgtaaaaatatttatgatacacatagtgtaatgttgtgtagctataaaaaattttttgtaaaaaaagtgttacttagatgtgttcttatatattcatgtacatattaacttattcatgtacatattataacttaacttattcatgtacatattatatttaaattatgtgtgatgtatttttattatggcatttcatttacatatgatttacgtatactaaactgacatattatatatttttttgctttacttgtaagtataagagcatgttacaaatagcatatgtagtgtgttactatttttgctaaaaattatatatatataaagatgggaagaaaatataagaaaataataatgtttacttgcataaaattcatttctttaactttctctgttctgtgctcatctattattttgctaaatttttaaagagcttatactacttctgtaattagaaaaacatagatttattaaaaagtaatatatatgaaaagagagacaatgagccttggtttatatcttgatgctactgctctagcttttcactctgtcactgacatgaacccccagcattctttttgaacagaaaacagcaaatacttagttaaaactaaaaatcaagacttttatccatgtaagtaaagtatagcttaattttaaacttcctgtatgctgtgtggggagaacaactgtatacaaccccctatattgagcaaagacacatgtgcatgcccctaactacatacagctctttctgcatctgcttcctaatagaatgccctagcaacatcaatgacaagttatgcttgagggctttctcaatcatttcagaaatgtcttcgggatggagtagaccctggaggagaatttcttcccatcagacactattttttttgttgttgttgttgagatgaagtctcattgtgttgccaggctggagtgcagtggcgtgatctcaggtcactgcaacctccaacctcctggttcaagcgattctcctgcctcagcctcccgagtagctggaattacaggcatgcaccatgatgcccagctaatttttgtatttttagtagagatggagtttcatcatgttggccaggatggtggtctagatctcctgacctcgtgatctgcctgccttggcctctcaaagtgctgggattacaggcatgagccactgcgtctggcccccatcagacactcttgatggggatgcttcaggagataaatctggaggtcagtcttaggagtacaatctgtgataagcactatggcaagaaattggagcttaagcattagttaagaggatcactagcaagagaaatgcaggtgaatgtcattggcttgccaattggaaaggctagaccagcttttattctgagttgggggccagttggtaggaaggatgtggcaaaggcaaagtgagggcgggtgccccggggctggagtagagctactctcatgtttgagactgtgttcccgaaaactaaaaacggcactgaacttctgataatcaggccaaacaaaatcaactcaatgtgtctgaaagacttttctaggtgcacatttctgaatatctacttttgtttttcagcccccaccttcttttaacttatgactcctattttatatgtggaaattgggctgtcaattgatgtggttaaagagagaaaaaaagagagagacagaagagagggggagagggaaaaaaacagctttagttatattagaaatctaggcagaacttcattttaactggtcccttctacttttgtaggctagatgtttctatagtaaccctcatgaaactgttcatcatacacagatcttatagtctatgacaaaatttctttggctttttttctttttggctggagagagtaacctatgagcaacctcaacacacaagaatgagaagttacttctgttttgatgtttttttcctaaatgatctaagcaaacagggctatggcagagagcacatctcactaaggccaacttggtagcaggccaccttgatgctatcaattttgcaatcccagctggtgttcctgtacagttttaagagaaggctctgtgcatggcccttatgaactccccactgcttgctgaggtggattaaaagatgcaaactcactgaaatacgccaaagaatataatggtctctacagaagatctggctgtgtcatccaacaaaaggttccagctgtggcagccgtgtggaacaaagggaactcttggcttaatgtggagtgcatgcttctgacgttccagttcaggcaagaaataaataaagctattacaaagcccttgaccagatgtgtctgacatagtctgaaacgtgtttgtacagaaacttcactatcaacgtggctccttcttatagcaacagacatctgttcctgaaggctgatggggtgcagtccataatcacagtgaggatctgatctagctggcttcactgagctgccttttccctggccacggttgttctcattaatctgcatagtctcagtcatatgtgggtcaatgatttatttaacacagaatctaaatgcttctgtgtcatggaatcaacatctgtccaatagtcaaagacttgaaaatttctatttgttttccaggagcgatggtatacattccccatagataacttgactttgttatgcctggtcacagtttacatctgtctttgacttatattgtttttaaggttggctattgatcattgttttcacatgaaaccttcattactctaattggaaccatttataaatacattccttggacagatgacaaaaggatccatgatggacaacttcttattcaaaacagctgcccaatatgtaaatcaaaagctgttaaagattgtattgagctgagaacaattatgcaaggttctagcctgttgtgaattaaaatgactgcattagaggttaaaggatttgtaaagggaatctttcttttcaagaatgccagttcaaattcagctcaggtcaccgacaagtaatatcatgtgaaaatcataaaacaaatctatcctctcagctttattgttaatagaatgataatgccttcaaaagctctatttactgcagtcagtcctttggttgtcttatctgaaaacccaaagattgaaaagacttaacaaatttaaggaattacttagaactgttcttaaatttcaggctagaattcagaaactttccataattttaagcacattataagatagttctttttaacttactctagtactatttatacgcagtttcttttttcccttttcatctgaaaaaaagagataaaatgaaagtcaaaactgagttactctttatagaactgtggaaataataactaatatttattactcttcgctatttgtcaattattattctaagtgctgcaacaggtattagatcatgtaatcctcataataatttaaagaggtaaaaactattattactttcatcttaaaaaaagttaaggccagcaaaattaaatacatttgggtaaggtcacaaaacccatgttcaaacccggaatatccaacttaagattctatactgctttactgtaatttcttcacagaaggcacattgaaagcctcagtcaagtgaatttactcagtcaagggaattaatgttggttaccactccaaaatctcagatagatacatagatgattgataggtagatggaagatatagatgatagatagatagatagatagatgacattaatatttatcgaaggctttcattgcctccagtatctacattttctcatttagtacctcaattgtatagataagttttattagctccatttaagatggcttttattagccccatttattttagcaggaagatgttgggacacagctactaagagaaagagctcaatgttcagttcctctcacctcattctaaactgcatcgcaagactgcagcaagtgtactaagcctttggaaacaactggtgtcactgtgtaactctcatttcatatgtcagttacatacttggaatcagtagcttgtgtaagacccaaagtcggttattttgagactcaaaacacttaaatttagttcagaatgtgttatcattactctaaagttttatgtttagtatgtctggtggatgagagggagataaaagggaattttgtccagggttcatttccagtagtaagctgaagtaatgtccgaattatatttatcttgtgagagcctaggcttgcaataatcatttcattttcgccctctccctcacagcagaaggcaatgggacaatggggaagaacataagcattgaagttgatggaatgaagaaaatgttctgaattgattttttaagtgaatacatttaattttattaacttgattatgtaaggccaccattacattagtcatacatgtagcctatttatgtgcataaaaaattctctgataaatatttaatgccagctgacagagtgcctcaaggattcaaggaaagaaaagaaatatttcaactacttaaaagaaaatattctatctctattatcctttcttgtctttccattgaacacattgaacctctctttctttttctgttttcagttctcttccccactgatcataattcaatagcctaattgagtcctggcctcttggcaacaagaattagttctctcaattctctttataaatgattacatttctgtttttctctcttcctaaagactgagttcttaagacttaactgtgtctatttatttattctatgttttggcagtgcctactgtatgtcaaacactaaatttgctaacaaggaaggtcaaaacacctgccttcaaagagctgagtagaggaagaagataggaagatgacataaataaaacaatgtcaaaatctattaaaattttgccatttttgttactgaagtgtaggagagagaaagaccatctatatgggaagatcagaaaaggcataggaaaagaggtggtccttaagttaaatataaaggaatttactgtaccaagcatacaaggaaggggagggtattccagacagtcatagtgaatgagaaatgtcttttagggatagatcttcttttccaaaaatcataatttgacttcaaatatgcatgtaaggaggagctacacaactttaaatatgcatttggagagactgtttctgtagtactattacagtataagtatgctgactataaaatacttacaatcagctcttaatcttcagtttaaggagagattgaatagtactaatgaattaagtctactttgtttattactgcatagatctctttttttctcaccttctaaagtgactattaactgaagtactcagcttttcaattatgtctgtattgagacaatgctttaattactatctcaatctatttgttaaatatgtgacaggtagcttcttattgttatactagtttatttttgcatccattcctatattagaagcatcttatcaggagaaaacatgcacaatacctccttctattctacacaaggccttggttagcttattttaatcaaacatttccatttaacttgatacatacaatttaagaaagaagaaggaaaggtaagcaaattagtgtttattgaggacttactaggtaccagagaggcaggctaactaagctacatttaaatggatgaagcagcgtgtaacatgggatttggagatgtacaagttggtgtcaagtcttgtctaggaattctcttcacctcttgaggcctcagatttcaaatgtataaaatggggatatgatagtgtctgatttatgagattatggcaaagatcaagggaacctatgttacggtacctacataaagaagatgtgcctaaaagcaaaatggtgttaattcataaacagttgtatcagtctactattttctcaacaatgctacataacaaaacagacaaacttagtggctttccacaatgaacacgaattttcttttcattggctttccacaatgaaaattggctttccacaatgaacacgaattttttcaggccagcagggagtctgcaaattgcaggccgagtttgactcagagttttgctcagagctataggctgggtatagatctgccatgactatttctcatcttccttatcccggtcagtggcttctcatggcagaagacagagcgggagagcaagcctaaatgtatagcacaattcaagcatctgtttaagtcacatctacgaacatccatggaccaacagctgagctgaaagtcaagcatgggcataaggaaaaaaaagcatatatttgctaagaaattattcaatctgccataatgttggcttattaatcagtttttaaaatttgaacgtataatcaaagttatctataataatgaatcacttgagtagctttataaaaaactataaaattaactatacaatttgaaagtagccttaaaaaaggagggctcaaataatctataactgattatgaaatcatacaaagttgaacaattaatgtcaaaagatacacaaatgattatataatgaatagtatatccaataaataactcaccatctaaacctttatgtgtcaggctacatgagaaacttcttaactgtgtgttttggaaaatcagaaagagcagaaaacatgtactcagttttctgtgtggttattagaggccaattgtttttccattttttcatttaatattcacaagtttattgagcccttttgtatcaattagctttacccaggcatttattcattctctcaaagagaaatttataaggtgcctactgtatgccaagctctgtgttagttattggagaaacaaccgttgactttaaacatctttccaaattggaaacttttatttcagagtataaaatataattgattttttaaattccacaaagccatgaagggcaaagaacttagtttggaaaaggttgcctacgaccttgaacatgccgcatgcctacatacttactaagtttccaggagtacatcaaatgagatcaaatgagcaatcctaggtagacatcaaaggcttcaattgtgtgcttaaagagcaagcctttcttacattttgggtacacagactttttaattgggtttttaatgagatatttcactggttgagaattattccaatttttttgctgctagtgaaaaaagttaatcagcagatatttgttaattttgaggccttgttctctttttttgtttgttttaggttttgtttttgagacggagtcctgctctgttgcccaggctggagtgcagtggcacgatctcagctcactgtatgtagcctctgcttcctgggttcaagcaattctcctgccccagcctcccgagtagctgggactacagacatgcaccaccatgcccaggtaattttttttgtatttttagtagagatggggtttcaccatgttggccaagctggtcttgatctcctgacctcatgatccgcccgcctcagcctcccaaagtgctgggattacaggcgtgagccactgcgcccagccgaggccttgttctcttctgaagcatttccacatacctcacattgagtctagagtcactacacttagacattctgcaaactgagggggttaagagtggaattctgtttctgcttttcaggattatgggctgtgtgtaaagacaataagggtgattccgctccaagttatagcacattctaaattctaaagatgttatgtgagagactcagtccaacatggcaaagacacatagaattaaagcattgctccactaagttcaaatttaatgatttcaataaccacactgagatgctttctactagtttctttttttccttttaaagagttcgatacagtttcagctttctagtgacaattagtgaaggcacggaagttggcatcttacctctaagccctctgttggtttttgtcttagcatcaacctctgagctacctttcagagagaaaagaattgatacagagcatcttttggaactgtgattaatggtgtaccttcattatccatcattttaccaccttgaacccacaacctggctttaattgtaccctataagaacacacctcatgctacaattctgcaagttttaccaaaaaaggactatatttctgctctaattaccatcacaacagctcccattatggtttgaccctagtaatttagttatatttatgctgctacaatgcaccaaatagataataatgaatactgatgcagactaaggttgaagcaaactataattatacagacctaatgaagttaccagaaaaggcagtatataaaaaaacatgctcagataaagaaaacacacacacacacacgcacagagagagagagattatttctcatgccccaagttctgcattatacttagaaattcctggatacttgacatgtgctgttcatgttcctttcttgctttctggtctgtgatttctggacttacaggtcacattccaagctttcatctttcatttctaagtgtctacctttatttttcaaataaagacaaacagctgtattacttatagagtaaatcaaatgggacacttattcggcaatcctctttcatgttaaacatgctaaattaaaattttaaaatcaaggggtttgttcaagatgttggcaattaaatctatcaaatgagcccatggctggagctcctcaaaataacagctaacaaagttactgcacctgtaaaataaagtcatagccagttagcagctcaggacaaagttgaaccagaaattggttttgtgcaagttgattaacaagtagtgtatagaaggaaaaaaacaaaggaagggtttggctatcaagtgttgacaatagaggtcctcctctggaaagacttagataaactttgggaatcagtgagacaaggctaaagaatcttgctcctccaagtattcagagggacctgaacacactgtttagctcattgacaaacagagataagacagaaaaaatgcattcaactgcctcattatttcatacgaatttgtgataattatcatggcacttttgctgattttcatttgttcctaagtaaccatctgatagaaatgggaaagccagaaaatgtgcagattccctggaatggctatgactctgagaaggaaggagatcccttgggattcctgtttcacctggttcttatccactctaatctcttgtaaacatgaagagcagtcattcttatcttactccacataggataacttctatagttatcaatttctaagaaggatgacattgttaatacagagccaagtccttgtagtaaaaacccccctaatggtttaggggtcatgttaaattatctgtgactattaaggttcaactggcttaaattctaaaatgtccttctaaatagatttctctcattctcctcattgttgaatagctctcaactatttcatgccccagtaggcccacattcctatttgaagtgcatatctgggtagcagattaagagaaaaaggatagaggcaaagtttaaatttgccaaaaagattttttttaatttgacaatttttccccatgtctcctcatcagtccataactagaaataaatcctggccaaactgcatttgtatgctccctaatgtctttcatatccatatcacttgctctctgttatctgtatacttttttgatctatcaactgtctttctctacaccaggtgagttagttagccacaaaaggatccagctattcatctggcagtcatctaagtattcagtattaagaggtggagctgctgtcttttgcttcacctactatactcttttctatctctgtaattagatttcctgatgaaagtgaagttgcagtggggacagatgttcttaaaattaaaaagaaaaaaaaaggttgaggaccagagaaagcacataaacatggggatggtttacgttattaaaaatgaagatcatgtgctttggatttcatacacgtttctgattaaaataaactaaaataaacctctgactccaacaaaacttcattttcttgcagggataagagaaaagaagtgggcatgagagagacgtgtcccattacacttagtgaatattctctacagctacttaaaggaggatcagggattcttcagtaaaatttttctgctgaactcttcaagtagttatagcaaagagaagtcttcaactagagaaggttgagaagtgtcagttctttctttcttctaatgctctgatccaaataggatgagtttatcttcaatcagattctgattgctgtgccataaataaaataaaatacaatataatgaaataaagtaaaaaaaaatgaagcagaataaaagtcctcttatgatcttcctatcacaacatacagatcttaagtatcaatcttcttcacctgtacacattggtcccatccatcaattttatcatggagttggcttaaaaatgaggatacatcttgtccttcactacacatgatggattccagatgttcagattaaataatggtgctcccctgtagacataatggaccatagcagcaatgtaactaagcaaaatgagcaaaccaggccctgcaaatgatcttaattatttcaactatgagggacagaaaagcactgggtaatacaacaaatagccctttgaaagagcaaaaaaaaaaaaaggcctggtaatttacatttaagtcaaacctgctccctgcaaagtataatgtgtgtaataattcaggaagaaatctagcactataccattttcataattagtattctatgtcaagtctctagcagcaagtagcatataaatcacgatgttaatattggtctgcttttcaatttatttaatgatattctacagtcaaagatttattgctaaaaatacgaatgtgcttttacatcattcaagatgtatctgtgcttccagcatttgaaaaggcagctacaaatgtcagaatttaggtaagtcagatttatacagcacacacacacacacacacacacacacacacgcacacacacacacagagagtgacgtatggaaacaagtctatatctttatttgtactttccatgattaagagaaagtacagattatattctacttggtataatattacttaaatacaatcttccaggcctgggaaaatgaagtaaaattgaagttcatgtcaagctggccaaaaggtgagttctaccccagaaatcttttgtggttgtctactaagccataaattaatctgtccgaatcattgacactcatccacaaagcacaggtggtagtctcctttcatacacaccaaagagagctagttaaaaataaattgtgctgccattaaaaacatgccaaaataatatttttcccatctgctaagtccagccccagtggtaagtgaactaacaggtttctacactcacacttgatgaacaggcaccacagcaattaattaacattaaaacaacaagagtcaattggatttctcccttttagacatttgttaaagccaaaagcagaatacataccctgtgtaacattcagccttgtgggtcttcagatgtggctgctctaaagcccatttttatctaaatatttacaacaaagttggtctgctgaacagccgtatcaagggggactctatgtcccaggttccacgctgccaaagccatgacccacagactcctcacagcttggcttgcctcattctcctgatacccacactacaaacaaggactatccaagggcaaagtctattttttgcattcaaccagttagttaaaaataaactttacagtttccttcccattaaaaaatatatgccaggcaaatataaatatattaagatgttgctatgaagggcattagaaaatccaaaaagagatgagtcttggctctgaaaagccattaataatctttaatctcatcacaagtgcctaggagaatgttaaacctttatagaaattaattggtttatggtttaagaagtttgaataaataatttagagaataggaaatctagcaaagataatgctccaaaaaggccaggaaaatgttagtagtacatcctttccaacttccaagggagatataactctactatttaagttgttcaaaactctgagaaataagttaactcctaaaagtatttttaaaagccagcataacactgagtcttcatgacttctaaagtggaaaaatatcaaaatcagggcattagagacagtggataaaaacaaatacattgattcctctctgtgtttatagctcttcattttgagttgcgtctcagcaggtaaatctatatgcagagggaagaaagagtatacatgcaaatagcatgcctatgggccatgacaaaaagagacccaagttcctgttcaattaagttgttgtgtcctgagtttgctctggtaacccatcccagggaggccaggaactggcagaaagaggtttctatgttttatctcccttctcttgccatacgttccgttcccttctcctttttccctctccttcgtttcttccttctgcattctttttcttccttctctaagcctttgctgggatgctactaaataagattgatccgataaggagaacaactcccacctattcccttatgccaagtctttggaatggggtaatttgttgagtggaggctcaacccagaggagttgctttcagcagatcgtcaattgccattgtgaatacagtcccatacaatcatatgcatatttgagacccactcagataccaaaatccatgaatgctcaagtcccttttataaaacggggtaacatttgcctataacttacccatatcctcctatatattttaaattgtctctagattacttctgataacaagtacaatgtaaatgctatgtgattagttatactgtattgttttctatttgtactatttttaattgttgttttatttttattaatgtttcttgctgaatatttttgatctgctgttgattgaatctgcaaatgcacaaccagggatatggagggctgactctataccttaaatcatgtacatcaatcaatcaatctatctatctccatttaaatccagtatattttaattaattccatgaatatctatggcagatttccaaagacagctgcaataacatctccagtgccacacattcttccagagccttgcctttcctccatcaagagaggatgtctaattatccccttgaatctgtgatttactgctaaccaatagaatacagcagaggtaacactgagtgacttttaattctagatcataaaaggtgttgcaactaggatacttgcttttggagaccacataagaaccctgacctccccaagactaccaggtaaagaggccacatatagtaggcactcttattaacagccccagctgaacctcagccaattgtcatgaccaactgtcagccaggtaagagagccttctcaaacatcctacctagtggagcttccagatggctgcagtcccaggtaacatctactgcaaccgtatgtgagaccctgagctaaagttgcctacttaagataatcccaaattcatgatctacaaaaccatgagcatgtcttaagtccccaagctttgggataatttgttactcagcaatggtaactggaacagccttaatatttcaagggatgacttctcattagagttcattggcataaagcatatacagcttggacaaaattgtacaggacaacttaaatataattatattttatatgagtaaagttttaggttttgtattcaaagcatcttcaacaacatcaaagatacatatgcatgatagctatttttcctactttctttttttctttcctttttctttttttaaagacaagaacttcctctgtggcccaggctggaatgtagtggcatgatcttggctcactgcagtctctaactcctgggctcaagcaatccttccaccttagcctcctgagtagctgggactacaggtgtgagccaccacacccatacatttcctattttcaattcagctccacttgtctttttatggaggaaacattgtttcttatccccacaatactccttatacagtgtgattaatatcttctgacctccagtcaagtcatccttctatctgaactggccatattggtcgctgagaaaacacaaggaaggaaggagatgaaagtacaagaaaggtgaagaatttgggtgttacttgagaatgcctcagttttcattttaagtaactaccaaaaataactttggtagtttatattatctaacatatttttataacaaatatctattttttctaggttaatatttattttatgaataggaatgtttctttttttttaattatactttaggttttagggtacatgtatacaacatgcaggttagttacatatgtatacctgtgccatgttggtgtgctgcacccattaactcctcatttaacattaggtatatctcctaatgctatcccttccccctcccccacaccacaacaggccccggtgtatgatattccccttcctgtgtccatgtgttctcattgttcaattcccacctatgagtgagaacatgtggtgtttggttttttgtccttgcgatagtttgctgagaatgatggtttccagcttcatccatgtccctacaaaggacatgaactcatcatttttatggctgcatagtattccatggtgtatatgtgccacattttcttaatccagtctatcactgttggacatttgggttggttccaagtctttgctattgtgaatagtgccgcaataaacatatgtgtgcatgtgtctttatagcagcatgaattataatcctttgggtatatacccagtaatgggatggctgggtcaaatggtatttctagttctagatccctgagcaatcgccacactgacttccacaatggttgaacgagtttacagtcccaccaacagcgtgaaagtgttcctatttctccacatcctctccagcacctgttgtttcctgactttttaatgattgccattctaactggtgtgacatggtatctcattgtggttttgatttgcatttctctgatggccagtgatgatgacaattttttcatgtgtcttttggctgcataaatgtcttcttttgagaagtgtctgttcatatcctttgcccactttttgatgggattgtttgtttttttcttgtaaatttgtttaagttcatcatagattctggatattagccctttgtcagatgagtagattgcaaaaattttctccattctgtaggttacctgttcactctgatggtagtttctcttgctgtgcagaagctctttagtttaattagatcccatttgtcaatttcggcttttgttgccattgcttttggtgttttagacatgaagtccttgcccatgcctatgtcctgaatggtattgcctaggttttcttctagggtttttatggttttaggtctaacacttaagtctttaatccatcttgaattaatttttgtataaggtgtaaggaagggatccagtttcagctttctacatatgactagccagttttcccagcaccatttattaaataggaaatcctttccccatttcttgtttttgtcaggtttgtcaaagatcagatagttgtagatacgtggcattatttctgagggctctgttctgtataacaaatatgtataagttcaataagtatactattggttttctaaagtgtacaatttgcttttttaaaaaatgttttatttagaatgttattcacacattaatctaaatcccatctttttggcaaataactttgagtatctttagacaatttttgaatacctgagtttctttctctctctgtctatatatatatataatatatatatacttttatttatttatttatttatttatttaattttattttttttgagacagagtctcgctttgtcaccaggctagagtgcagtggtgcaatctcggctcactgcaacctccgtctcccagattcaagcggttctcctgcctcagcctcctccccagtagctgggactacaggctcgcctcaccatgcccaggtaatttttgtatttttagtagagatgaagtttcaccatcttggccaggatggtctcgatctcttggcctcgagatccacccacctcagcctcccaaagtactgggattacaggcatgagccaccatgccctgccatatatggactttttaactgattgtctcagtatatggtcttgaatacaggaaaataattgcattaacttttgagtttgttattttattagctataagctgtgaagtaatctatgattcagcttgcttttacttctctgcccttgtagggggatgatctagctgatgacaacctggcagatttatgtctagggagaatcagtcccaccctgtgtgggtgttggcttaaatggctctagtccctctggtgcaaagaggtcctgtcacctcagcaagcaaggaggacaagttggagccagctaacatccgtcaggaactccacggccaaaggcatgatgtggagggaagaactgagttcactgtcaactatactaaattgaagggaaaaataatgtaagttaggtcatcaacttggtcccaatcttaaggagaaaattgctggtggtaaaatagcaccagactctgtcctttagttgtgaagtcacgttagcatatctatgctaatgtcagttactatagcaaggctggcatgcatattgttctgatttggcataataggtggggtaaaaattgcatttacccattgaaaactttgatggagacttcctaaggaaagtgaccagagccagaggatccagagtctaactcagaccctcagtcattttacacttttgatttattttttttccaatggaaacaatttccactttttttccaatgaaaaataagagattttaaaggacattctgagtcccaaaaaacatcttcattcttttggaatgcttttgaacatacaaggtactaacttgcaaattaaacagatgatttttagattggagtcttaactacccttaagctaacaaattcataggcggaaaagaagatactcttttgtacagctaacgtctcttgcaaaacaatgctttcttgagttcagtgcaaatccattagaaacataaacattaaactgccccttaaatacatatgtgttcatatgggagaggtgttgatgtatatttagccttttatcaaaacccttaatattagaaaaagaggtatatatttgagaaaatcaaaatcgatgttgtagtcacattttcagacaaatgtgatgtatagtgtgaacattgcaatatgtttggtatgtatttctacagctggatttgccttgagttcagaaaggaggtagctaatggactgatggtgtttgacaagttatggtttagggtgtaataatgtttaggcttgagaattcttatcgaccttctgaaatgctgtactttttaatttggaagagttaaacatgtattttaatatcaacaaaaacaatgtgtatatataatatgtctctttatctaatctacctattaatatctagatatctgattgaatggcaagacatcctcatgttaatgaagggaaggcctagtgaattagctaaggtgaggagtccttcccctgcaggaaagagtatatttgcaaagacaggtcaggtctgagtcacaatttttgggttagtggcaagctgatgaagtcaatccagcttcatgttctcctgactaatgcaagatttgggtcagagtccaggccctgcctctatggagagaacaggcaagggcaggcaaagtagtgtgaacagagacctaatttaagctcaaatcctttgtcgttcaacaaaagagtgaggggattttatgttagagttggggtgaaaaatagaagcaaccaattttcttgcagtaaatgcaatcgaaaccatttctgaagtttccatgaacttaggagatctctttaatttgtacagcaacctctggatttgctgcttttggttagaaaggttggaagattctgcaaactttgtggtaggtcacctaagccagtgcttttcaaagttctatgtgcacataaatgcttgaggattttgttgaagtttctgattcagttggtgtggattaggtcccatggattttcctttctcccaggtgaaactgatgctgctaatctggagatcaccctacgagcagcaaggacaccagtaattctgtctgcatattttaatcacattgggagggctgcccgatttcagcattatctgttgctcatctgaaatttcagatgagcaacaaataattttttaaatataagtatgcccaatgcaaatatttgggatatatttgtaataaaaaatatttttgtctatctgaaattcgaagacattggcgtcttccattttacctggaagccctacgtgaggaatatgttaaaatagctaaatcttgaattactgcccgagatattcaaatttaattagtctgggtttcagcctgagcataagtactttacaaaatacccccggagttttaatgagcaattgagagccactgattaaaactcaacccatattaaacaggtgaggaaactgaagtccaaggtgtcatagaagatagtggtaaaatggggatgaaaatttaggattttccggtactctttgtcctctaccccctccatcttgactgttaaacagtagaaaacatgtttctccttttgaagcttaaggggtagcctcctttgagaactctatttgctcttaggtctctgaagttgggggtcatctcccctaatgtaagtcactccattaaattctgtagttctcaccctagaaagcgttagagatctgccttttatgaatcttactcatgaatgctttaaagttcatttatcctaattgttaactccatatctgggagctttaaaaaacactaatgtctggatgccaccctcagagattctgatacaattggtctggggtgcagcataagcactggaatttttggaaagcttcccgagtgattctaatgctcaggcagagaagaacagtactgctttctcagactctttaaatgcagtggacctggggcctgtaactctaaagttgtctgtaagtggcgggtccagctgagcccatcgcagatgtgtgtaaatcagcaacttcaaaggctggaaatgctgagcttgactgcagggtaaacctggaatgcctcatatgttattctttcaagacttgtcaaagcatttgaatcagttctaattaaaaaacacatagtttccttagattccagagtcttaaaatacctatatgagccgtgtatgtatttccactggttctaggatatcctgtttctctgatggaatgaagaataaatagttattttacaaaaataaaaaataaaaaaagagaggtaggagatggggaggtggggaaaaagcgagcatttgcttattctgagctttctaactagcagtttcaaggtgctaggaaacccaccctaaccctcactctttccaagtgatcttgtaccttttcccattcatttgaagaaagtagagcaggttcctgctttagaaacaactgcgtatcaggccttttgtgaagaagaaagatttcttagcaaaagtattttggcaggaactacgacaactagtgagaccatctattttcttcctgctttctccttcaagaattgaaatgcaatcagagtatccatgaatgaatcacactatttaagatagggatatgggggacttctgaagtctcaaaattgcagattggtaaaagtggtaattggagtgcttattaattagcctgaccacattatatgaaactaccctattatatttctataagcttggtgaatttatttaggtttaaataactggatcacacaatcacaggtacaccaacttgtccaattcatattttccaattcccaatccaattgttcttcacaattaagacagatagacgctgattgttttgttgtatgcttctggttttattatgtaaataaaatagactttggtttacccccttccaagtcaactgaaagaagactcatctacacagatggaaagacttactgactttgtacaaagcaagaccaatccccccatccagttcaaccaacctgcaagtacttagactcaccctgtaaatatggaaagcacaatgattccacagtagtttatccaagagtattgtaattttcaacacatttcaatatggcacattattaatctagaaggaaaagtgaaaaggaaagatgaccatctttattggatgggatatttctttataaattaccatttgtcagaaagctttattgagataaagcttaatttgtggtttgatccctttttattttcctttcatctcttctaatcctcaaacatttatttgcctcagggaagctctatatgacaggtttaaaagtgaacattatttttagactacctggctttcaaagctctgttttccagaagccttgaaatcagggaaggagagaaggagacactcccagaaggtgttctggatataaggtgactagtaaagaagctaagaccaaagaaaattttgctttctcttgtactcaagagggcagaatccaagcatgggctgtttctccaagaatttgaaaaaccctgagtttggggcagaacagcactcagagtttgaagatgccagttatcaagagattttcaggcttgagcaaggaacagtgttgcaatattttgcaaagaaaaatacatgacaaccaattaaatttgaatttcaggtaaatgttgaattactttttagcataagtatgtcccatgcattatttgtgactaaatgttcatttatatttaaagcattatttatactaaaaattattcattatttttatgaaattcacaattagcaggtatcttagtctgtgctagtataacaaaatatcacagactgggtaatttacaaacaataggaatttattgctcataattctagagtccgggaagtgcaagatcaagcaacagttgtgttggtgtcttaagggcttgttctcggcttccagatggtgctttattgctgcatcctctggagaagaatgctgtgtcctcacatggctgaaggggtagaagagcaagagagtatttccttctatacctcaggcacctttagaagggtactaatcccattcatgaggatggagccctcatggcttaatcactagccaaaggcaacacctctcaaagtggttgcaatgtggattaagtttcaatacaaaaaatacaaattttggagcacgcaccatcatttaaaccacagcagcaggtgccttttattttatttggaaactataagaaggtggacttcattattgattataatggactgatagagacatgtcctagctttcatatttcagatagcaaataagactttgggaatattgggcaaaattaggctagaggaatggccctattctataatggctaagacgtattttccactaactggacaaaaggaaaactcaaaaactatttaattgatttaaaaaaataaacaaatttgctatttcttgtatatcaaatctttgaagattaatactcactataatctgaatccctgtctgttggagacatgtttcccaagatatcttgggtaaggcatatggtcactttattgtaggtggataaaaacatgggagaagagaatcctcaagatttgctgtttttccctcaacaagataagaggtcatttatcatactataaaaagagagtgggagactcctggaaccatgtttctgaaatacgtaaagcttgctgtcaccagaaccctggaggtttttttattatcttgtatattttattatttttatttttaattattattgatatataatagtatctttttatgggatcatgtgaaatattaataaaagcatacagtgtgtaatgatcaaatcagagtaattggtatacccattaccttgagtatatattatttgtgttaagaacatttcaattccacacttctagttattttgaaagatacaataagttaactatagtcaccctattgtgctactgaatactagatattatttcttctatctaattctgtttttgtacccatttaccaaaccatctttattcaatccccacttcctattacccttcccagccttggtatccatcattccattatctacctccatgagattattcttttagcttgcatgtatgagtgaaaacatgcaatatttgtctttctgtgtctggcttatttcacttaataccctccagttccatccacattgttgcaaatgacaggatctgattcttttatatgcctgaatagtattctattgtatgtatgtactacattttctttatccatttatccagtgatggaacttaggttgattccatatcttggaaccataaattggttttgatggaaacccatgtctctggtcaatgaaaaaaaaatgtaggtttttctctgtaagctgaattatgtcacatggtatacagcaaatgcattaaaattaggatggccatcttttcaggaaaacctaaacactaagttcctctacatgacttatctttccacatatgtcttcctttatagtgaaaataacctgatacgagatggtcatggatgtggcccactgaactcaccatgcctcacattcccacctgtgaacagcaagggaggaataatattatagataagacacttgtttttggaatggagcacagctgctgtgtaatggcccagaggaaccccagcctgagaccagaagtgaaggagaatccctgcctcactcaatctgaaagggaaatcaaagcaagcagattctagtgtcccaagcatcaggacaagccagtcaggaggactaacatcccttctctcaatgacattatgccaagagtttttgttttgttttgttattttttaaaatgagcaacagccttcagatcccgagtttaaaggcctgatgcaggcctgagtcattggcactgctctgtaactcctctctgttgcaggtgtgctgccgggctcctctgggtccagcccaaacgccctccccttcctcctcactcccctctctccacctgacaattgtaaaatttaaggagcagatcctctcagggtggtatagcttcaggcacatgaattctttccggggctctttgagcttggaagcagtttaaaggtaagaaggtttgaagagtgaatgagttcccaagaataaacatgtttcaaaggaacctgaatgagggactctgtttatgcgggttttatatgacgtttgcttacttaatgtagtaactccttgaacatattgccttgtatgatataatttatttacataattctggattggaaagtcatgagcaaacccaaggaaaatttctagaaaaaagaaaacttgtttttataaggattttaaaattaaatatatgtatgtgtatacttatgtatatctacgtggatgtatgtaaatccacagatacagagattatatacatgtatagctaatagacttagattagatataaatatttgaaaaagatggcaaaataaatgtagatcataagccagtttccagcctgttttaatttatgccaaattatttcctacaggatataaaagaatatggtgcttttaaattattccaatccaagttttgcttttttaaagcatttcagtttttgccacattgatctattacaaaactagggaagtcctttaaagcactgaactgttcaaaactctcatgacagaatcatgataaacgatttttaaaaaagcagtttacttttagtggtaaagatatcttttttattctgaaaagaggataaaaaatttctcctacagtgaagataggtaaaggaaaggaaaaagagtctttctagaagtgtaagtgtgctcattttctacaaaaataaaaaacaaacaaaaaaataaattaatgtcccgtaaaggagattattagctgctttattttatttatttgttttttctctatctttatctacagttaagtttttctttttcttctggtctatatcttagacttcagaaatttaggtagtagaactggagataaaggaaatacagagaagattggtatatacgtcagataagcttttcaattacaaattaacctgaaccatacaggtacctaaaacaccatggccacagcacagcaagactgatgattttagttgtctaggaaaagcactgtatcagtcattttgctgaggtaacttatattgttcaagagaaagccagacggttcaggatagattgtcgctatctgggttcattctatttttaaaaatcccttttttattactcactatttcataaccaataaacatactactagataacaggaaggtaaagataatcgccgtttgaaagggattctgttttggatgttgaaattctttcttgttgagaaagagaggagatgctgagaaactggtggtggagatgctgtaggtgctttggtccatattccatagggatcagtaaggaacatggaaaacacaatccaagaaaggaagtgactttcacatttattcatggggcatgttagagaaacttaggtcagaaaaaggtcatgtttgttttctccataggtgaatttggcctccttataatcctcacatttcaaatctaaatgatttaagctacacccagatcccaggccaattctttaaccatttgagggatttttccattcactggacatagaaaagaagctttgatgggaaacctagaaattacctgctccaaacttgaagttaataaaacatcttatggtgactttgttctttgttaaatgttgaggagacagcattaccaagccactttagaagcctttaaagttactaaaggttatctactgggcgtctccgtctaggtgtggatcatccattggtagccctttggttcaacaacttttcaaagtttcatcttccatggcagaattcttatctagtttctatctgcaatcaatatctcataaagaactaattggtaacatttatggtactgacactaagaagaatggcaaaaatgtagtaaaagcagtttcattttatgaatgttctttattatacaagtccagccttttagcagtttaataaaatcataattgtatttactagaaattctctagtggttatcatttcggggttggggtggaggaagcagttagagagaaaagaactagacatctcagatgaggctatgggcttctttctaaatgcattaaagagtggattcaagttattgcttataaatactcaaatttatggctattctagagtggcccagcatgaatagcacacactctctgctattcatgagtatcaagagtatcaaggggaaaattcaaagagagttgagaaatgctgagaaaatgaaacaccagagcttctcagggttaagagtattgtggaaaaagataagctagagtttttttcataagtcctttggtcagcaataaaaggtatatcctcaatcctataagggagatttaaattacatttgactagcattctgtgtttctataaatgagaccctaagaagcggctgagccatttggcatgccctcatttatttgggttacatggccatgttttataaggccacatgaaatgtgagttctataaaaataagaattatatcattcttttctgaatcttcatctcttttggtttatgtccaataaatgatgacagaattattttgtaagtttgttgtttttcagaaacagtgctactaagtactatccctcagactattacaatagtaatagcaatatttgtagaatactttgtagtttagaaaatgctttcccaattatctgtgtagtacatgactttatttctaccttgtgatgtatgggaaaatgtccaaatattattcataaccagaagtaaaacagtctactggtaaacatgaactcccactaaactccagcttgtgtttcagtccaaataggattatccttggatgagtagtggtctttcttttgcctgtttttacggtaatctcctcaatctctggctccatctggtggaatattgtgaggtcatggccatgggcatcactcttcctaagtctactttataggaccagtattgtgtctttatgatcctccaaggaaatagaaacaagcctttcagaatctgaagattggattatctactaggccaataaattttctcttgctaatatgactgcttcttagagtagaatatctattttacaaaaacaccttttcccagtaggtttaaagaagaaaaaatgcataggataaaaaaaatatatattctaccctgccaaagatagcttacattgttgttgttgttgttgtttttcacctcacatctcccaggaagtagagtgggctgaggatgctattgtagaaaaaacaactgaaacttacactaattaagtttcccaaagggggaaaaagcggggcaaagacaagaccaaaagtcaaatgctttgatcctacatgcattaattatagcatgtagatttcattacttaaaacaaaaaagtgaaaaaaaaaacccttcatttagcgtatttcgtaatatacattttacatatttttggaatgtcttaaatattacacaatagaaaaataaatgagaaaaacttccttatctacaagggtaaaaaaaaattgaaacgaaagtgatactaaatcaattttgattaaatatcttatttttgaaaaattttaaaaagtacatataaacttctgagttcatttttagatccctctttggaaccttgaaaggggttacacaagtaggggccctaaaggttaagcttcattagtttcatgacgaaccaactttggattgactctcaaacaccatagatggaagaggcttctttttttttttttttttttgagacagagtcttgctctgtcgcccaggctggagtgcagtggcatgatcttggctcactgcaacctccgcctcctgggttcaagggattcttctgcctcagcctcctgagtagctgggactacaggtgcgtgccaccatgcctggctaatttttgtatttttagtacagatggagtttcaccatattgaccaggctggttttgaactcctgacctcgtgatctacctgcttcagcctcccaaagtgctgggattataggcctgagccactgcacctagctgaggcttctttaaagttggtttgatcatcattatttcttggttgtctcacttactgatcatcttcttcaatttccaggtttgcattagggatatttttgaaagtcaatattttggagtaacgtgattttttgttttgttttgttttcggtaaccatctattttcatataggttagaagaaagaccacatctcatgtttcatgtagttttctattgctgtgtttccaaagtttggatatggtatggctggagaggaaactatgagttatatgtgatagcaaccagactatctacataggagtctatataaatggcagcttggagttgtgcaacgaggttcccattaatggctgaagtggctttaagcaatagttcggcatgagatgtatttaatgtttagcacacacttaatttcctgtgtagacttttggttctgtatccttcctctctcaatctctctttaactctctccctctcttaggcaataaacagtatgtttgacctgcccaggtatggcaaccaccattattgattctagtagcaacttacattgctgacatgttttaatgtttaaaaattactgtccatttgtttcagttcctatcaatcatcctacagccctttactctcttgatggttgaggaaaatctcatcatttcccttcttcaccatttgtggatcttcttacattcagtcataagaaggagtctcatccttagagggagaagggagagattctgggaggtagggcaataaataacttgaccaaaccttttgcatcttttagaacctcaataagctgttctctctgggactaggaatttatgtgatatatgacttttcaaaatagacttagcttttggagaacattaggattcacaatgaaattgacaaaaaggacagagatttcccatatattccctgccccacaaatgcacagcctcccatcatctctttctctcataggatactcatcaaaaaaagtaaacgaacaatgcactgtaaaacacttggcaccttgtagccacttcatcctggtgctacttatgaaagaagtaaactttgagctaagccttaactgttaaataaattcaagatagttgcagtggttgggttcttgataagtaaacaacagttaataaatgtagattgggcaaagttgtagaaggaagggtttgggggatagtgagcaagtgtctaaacttgtggggagttcctccagttcttgagagtgactcactcactaatctcatataaactaattcacaatgaggtgtcaatggcttagtgatacctctcctaagacattaaaggatttttttttgagattaatgtttttatttaaagaacttaatttcctgtggtaagggtttcacataagagggtaggatgattttatggatatttcagggtaggggaaaattttagcatcatcatttaagccatactacagaagtaactggggcaagtccctctgcaagataagctgataaaatgtttgttttggagttgctttgttattattgttgctatttttagttttttgcagtgcttttatggagatgtggattaatttgaaaatagcatggtaattgtatgtgtgcgtgcttgtgtgtgtgtgtgtttatgtgtgtgttactgtgtttgtgccctggggcgtcctaggtgaagggctcccttgaaaaatttgaaacaaataaataaaatgagaactgacctaaatttttgcctcaaactggaactgagttcaagcttttgaggaggatcaaaaacttgattaactgttgtttatttgtttttagaggctttgcttccctctaactcaaaaaagtaaaagtgatcaaacactaccctctgagagagactcttgtctcaatatttccaacagggttgaaaccagaaagtacttgtgaggcaactgggaagcacaagtgaattgcagcccaaggtcccagatccaaggggttagaaggagttcagctaaacttcatgttgatgtccaaggaaaacagcagtagtgttgttttcagtggaattgagatcctagagggcagaaaacatcattatgtgaaacagaaaaagaacgtgcatttgtgtttttcaccacagtctgggagacaacacattttctcattggttgaaaagtaaaaagagacccatgggatgggctgaaacctgtgggtcaacttgaggcagctggtgtaaggcaaagctgtgagggacaattcaggagacttggaattaaggctcccttctcacagctgtgtgacctggaacatgctgtgtagctcctacagaattttcgtatttgaatctgtgaagtgttcagttgttcagaataccaatgccctgtctcacatggcacacttcaataggtgcttcgcacctttccaagtttgataagaaccagttgtacccttgtgaatagtaaatttcaggtgggactccagacacatactaaaatcatttgtattaaaaaaataagcataacagacaaacagagagccaaatcatgagtgaactcccattcacaattgcttcaaagggaataaaatacctaggaatccaacttacaagggatgtgaaggacctcttcaaggagagctacaaaccactgctcaatgaaataaaagagggcacaaacaaatggaagaacactccatgctcatggataggaagaatcaatattgtgaaaatggccataccgcccaaggtaatttatagattcaatgccatccccatcaagctaccaatgactttctgcacaaaatttgaaaaaactactttaaagttcatatggaaccaaaaaagagaccgcattgccaagacaatcctaagccaaacgaacaaagctggagccatcacactacctgacttcaaactacactacaaggctacagtaagcaaaacagcatggtactgttaccaaaacagagatatagaccaatggaacagaacagagccctcagaaataatcccacacatctacaactatctgatctttgacaaacctgacaaaaacaagaaatggggaaaggatttcctttttaataaatggtgctgggaaaactggctagccatatgtagaaagctgaaactggatcctttccttacaccttatacaaaaattaattcaagatggattaaagacttaagtgttagacctaaaaccataaaaaccctagaagaaaacctaggcaataccattcaggacataggcatgggcaaggacttcatgactaaaacaccaaaagcaatggcaacaaaagccaaaactgacaaatgggatctagttaaactaaacagcttctgcactgcaaaagaaaccaccatcagagtgaacaggcaacctgcagaatgggagaaaatttttacaatctacccatctgacaaagggctaatatctagaatctacaaagaactcacacaaatttacaagaaaaaaaatcaaacaattccatcaaaaagtgggcaaaggatatgaacagacacctctcaaaagaagacatttatgcagccaacagacacatgaaaaaatgctcatcaccactggccatcagagaaatgcaaatcaaaaccacaatgagataccatctcacaccggttagaatggcaatcattaaaaagtcaggaaacaacaggtgatggagaggatgtggagaaataggaacacttttacactgttggtgggactgtaaactagttcaatcattgttgaagacagtgtggtgattcctcaaggatctagaactagaaataccatctgacccagccatcccattactgggtatatacccaaaggattataattcatgctgctataaagacacatgcacacatatgtttattgtggcactattcacaatagcaaagacttggaaccaacccaaatgtccatcaatgatagactggattaagaaaatgtggcacatatacaccatggaatactatgcagccataaaaaatgatgagttcatgtcctttgtagggacatggatgaagctggaaaccatcattctcagcaaactatcacaaggacagaaaaccaaacacctcatgttctcactcataggtgggaattgaacaatgagaacacttggacacaggaaagggaacatcacacaccggggcctgtcgtggggtgggggcagtggggagggatagcattaggagatatacctaatgtaaatgacgagttaaagggtgcagcacaccagcatggcacatgtatacatatgtaacaaacctgcatgttgtgcacatgtaccctagaacttaaagtaaaattttaaaaaaagggaaaaaaacattatgagaatttgcgtaaaagaaggtataataatttggataatatggcttaacctccatgttttggaagactttataagaacagaatttaaaaatgagtagagttttgatacagagaaattcattggatggaggacattataagcagaagtaacaccataaaaaggtaacataagaaagcaagatttaacatagcaaatagcaagtaagcaacattgtttgaactggagaggggttaggagataattttggaaaaatcattgcggtcaaaggatggatgttcttggttgctaagctgctggtttgggctttattttatatgcaacaggggtacttagagttttgctcagatgtatgaataaatgtaatcctttatcaatattaaatttaaaatagttgataaagtgaattaggaggaaaagctaaagggagaggctaaccatttaagagttcatcacattaatttgggtaagaggtagtatggccctaaccaagacaatgaccatgcttatggaaaggaggttgtgtgtcttgtagtcagatggaggtagaatcaagaggatctggcactaactgtagccaggaagggaggaagaggagccagagaggattctaagtcttcaagcttgaatggcttgagagatgttgtaattaatttgagaaacttcagatagaaacaggcttgagagagaaaatggtgagtccagttgagtttgagattagaaagtcatctagtgaggatgggagtttgaatcttgaaatcaagagctaggtgaaggctggagacaaagatggaaagttatttgcaaagacatcacagctgaaatcatggaagtactggatactgatgtacattattcaatttcttttcctggtctgatgccagctatacagatattattcctgggctttgttaataagtttccttgtgtgagcttgtctcttggcaactgggctttgtccctggaacttaaagccatctctgctgagctgagtatcaacaccttcacgagttcttcaagtctgatctaacctctgcaattcactgcctattcttatcaccctgatttttatcatcacctcaactcactatgtctatgacctgtagctctcatgctgataaaggttagaaatgcttatcaaaacattttttttaaaaaaggaagcttcagggttttgtttgcctctctaggttttttatttaattctacaaataaaacctataccttaaggatctggatgtatcattttaatgctttccaccagcaatgtgcattttaataatgtatttccaaaaaccattccaggaaaatttcagtgccaagaaaacataggaaattccttcctactgtatatatcacatttttcttgttttctataaggcttcacatgaatcacatagaaatttttttcaatattcaaagacatgtgaataggtagatatcgaaattctacaagacagatgaccgatctttagacctggctttaaaactttatggttgtgtttctcttgataaatcatttgagattacagtgttataccttactggtatgagaattcaatgaggtaagccaccattcccccaaaacagtaaagaactaaaaagtataaaatatgggacatgggataaataaaaacaaactatttattataatatggaatattagaagtaatacataccatactaattctatgtttgtgattatttgattaatgcctataaccagcagcggactgttaattcatgatgtacagtcacgtcaggtttcaggttttgttcatcgtagtcccagcaactagtgttacatttagcatatagtaggcacagagtaaaaatttttgaatgaattgaatgctttgatgcttaaatttagtccatttagtataataagagaatgcattttaattatgaaaacttttttctttgaaaattcaatacagttgataatgcaaatttttacaagagtcatttagataactttatagataaaatatccatggcagtgaagtgaggaaagatagagatgattgaaaaaattttagaggcccttgttctgttttacctgggttccaaagctggaataaatcaaaactgattttgacatgtccctaagtagtctttcttgtgttccagtgctatgttcccttggctttgttccttgtgtgcttctgtgtaaaccatatgttcctcaaacagtaaacgatacctgtacttcatccccttttccatttctccttgcagttttgtcctcatccacagaacgctgttgaatttcctctccaagaactcaccagcagctttacagaatatttttcttgcctatgctgccgatcagctttctttctctcttgaattccacttcccttggcttttattttcctccttttaaaaatattcattgtaaattcattgtcaaattttttttttttttttgacagagtcttgctctgtcacccaggctggagtgcagtggtgtgatctcagctcactgcaatcccttcctcccaggttcaagtgattctcatgcctcagcctccagagtagctgggaccacaggcacataccgccacgcctagctaatttttgtatctttttgtagagatggggttttccatgttccccaggatggttttgaactcttggcatcaagcgatccacccacctcggcctccaaaagtgctgggattataggcatgagccaccgtgccctgcctgtcaatataattcttttattcacctgtaacaatctcaaatattagaactctctggaaatcttcaatgtcttggtttttccacatagtgtttaatggtttttacctttcttctccgtggaaacagtttcagtagccacttggacattttgacatgaacatatttataaagttgcaaactcagtttatcaaaagttgactattaattttttacttttttcactcctctcctcaaatcacctatattggtctattagaaaccaccatttaccacatgaaattggctcttcaaatttccctccccaccaatctctctttgtcaccccatattcaataaaagtcttgtcaattttacttcccaatgcccattatgcgacgaccacatttttgccccagccatccaagtcctgattcaattggtcttcattagagtcatcgtgtcctgttacccatctctacttcatgtagcacactgccaccaacattatctttctaaaacttacatctgcagatgacggtcctttttatgctcagtctctaatgggtaaagtttttgatccaacattaataatcttttaaaataaggctcaaaactgtcttgctaattttctttatttttaatttgtaaaggcttaattatatgtaattcacatatcatgaatttcacccattagagtgtaaaaaatcagtgggttttagtatattcacaaaactgtgcagctacaatcaattttagaacagtcttatcagcctcggaagaagctgtatttcctttaggtgtcaaccatgcccagtttccctcatcagaaactctatttcctttaggcctcaaccatggtcaatttccctcatctcatccctaggcataggcatccattattttattttatgtctctatagattttcctattactggcatttcatataaatggaatctttgaatacatggtcttctttcattcagcatgatgttttaaaggttcatttatgttatagcatgtataagtattttgctagttttcattgcagaataatatatcacattgtatgcatatatcacattttatttaaatattaatcaattgctagtctcttttggccctgtcttttcctcctaccatatcttgtacttctcttattttcaccactttaaattttttttctcaatttcctagaattcttcatacctgctgttttagaattggttgtttaagtttccttattttcaagtagattttaagactgttctttttcatattcctaaaactgagggttttttttttttaacatagataatcaattctattcaatgaaaatgaattcggtctactgttttcagtattttgatacttaggaatgtgaaagctataataaccagaaatgcaagaatgaacactgtcttaaaatttacgacatactgtcacaatatttaaacctacaatcgtgcgtgtatggtcattgtgcttgtataattgatttgatgtcctttatttatatgtgaaacaacattattggcataaattctatcagttttctaatataagagtgataaattggggtaaattaacaaatatctttggctattccaaagttaaagacattggactggagtactatgggagatcgggaggtgcaaagaattatgggaaataacacatgaacacaaacaatcatgaactaacctgtcatgacaggaaatgggaactgtttagttcttggacacagcagcaaaaacagcagattactttaggttgagccactattaaagaactctggattagataagattaaattcagtccataaagaaaaacaggatttagatagatagatgaagacaagagagatggttaattgggaccacctaaaagccaaatttgttgacaagggaaatcctcattcagatctgagttttggtacggccctgggcatattttgttaatctagttaattccttgcagttattcagctatgccaatgttctctcttgctttgtgaatttgcacaaactgctccctttgcccgttcactctaccccctccccaccccccaatctgtctggctgtctttcttgccaactaaaattcagtttaaatcaatttcttttctaaagtctttcctattcacctcttgctgagttaggtgcacccttcactatatatctataacccccaattggaacatagcccatgttggataaataggtgattgaatggataaaaaataaataaatgagagtatgaaatattaaactacctcactgaatccttcctattcacactgtctctcaccatttattttctaaatctgctttctagctagctttttgaaagaacttagaccatgtgaagcaggacagaaacatgtaagtggaagatggtatttattttagtaattcacaatatcttgttacgattctggaaaggcagtaatgcttaaagtatgatccctgaacaagcagtgtcatcttcacttggaagctcattagaaatgtaaattctcagattccatctccaaacctacttagtcagaaatggggagagaagagtggttttcacaagccctctaagtgattctgaggcctgctaacatttgagaactactatactatattgaggttgctttcgtaatgtcataagggacttgcaggtggtttgatatgctcatttagctcgtctaaatgattcatttcttctgtaaaatcattcatttctccaaaaagtcccctggttccttttcttggaaaattgtattcaaaactaacatctgggggataggtgtgtttgctgcttctggggcatcatttatttctaggctctctcattggacacacacacgtgtgtgtgtgtgtgtgtgtgtgtatgtgtgcagataagtgtatattcatggattaatacacatatttccttcctttccacatatgtgtgtgtatatgtatttaatggtgcaatcacagctcactgcagcctcaagcaattctcccacctctgcctcctcagtagctgggaccacagatgtgtgctaccacacctggctaatttttttttttttttaatagagacaggatcttccctatgtttctcaggctggtctcaaactcctgggctcaagtgatccacatgcctcggcttcacaaattgtggggattacagacgggagccaccacgcttggccgtctatgccacctggatcgtattagccttctcttcacctgggttgtatacaaccttctactctaacagtgaggaacctagttctcaccatcttccatacatctactcaattgttcaaatccagtgtgtgtctataatggttccataatttttaacataccgtctggtaaacaacattaccagttagagtttgacattctcatgtagttcttttcctctgattgtgttggagtggcaatccaaaataaaacttaatgttaagtgtttcataatctagaagaacaagtcctctaagagactaatctgtaacatcctggcttgtgtattaaaacgaaaaaaagaaagaacccattcacaaaaggataaagaacataaacatcatcagaggtagtccagaccctggaaaaagtgaaggaacatttccaaacttagtgcaattcctgcaactgacagtacatgtgcagggcccattttgttaaattattcatagatttagaatgacctgacacactcaaatgttaataaatacataattattaaattctattacatgaaattaggtaactaaaactggcctattgtggttcctcctatccaaagcagtatttcaggtcctcacaaaatcagaagtatataagaaggccagaaagtctgaattttggcacatttcttctttctagaaaaggttcacaggtaggatggtagatgaggagctggtgggccagggagagtggagaagctggccatagcactgggaggggcttatctaaagttcctagtggtccaggagctactttttatggctcttctaaggaaaatggtacccattaagaatgatttttttaaaagcaaatgacatcctattcataatttcttcttaaaaatatgtcacctctgctaggaagaaaccaaaattgccctacatgagcattcatcattattttttaatcttcattttcttgttgtgtttctttattacatttgattatgtctgtcctgtattatagtttcttatttgtagtgttgcttaccttttcctgttcaatctgccctacgtattctctttgagggtggaggcttgatctcattatttgaatgcttaacatatagttgattatcaacaaatattgaatagaaagctcaaagaacacatagaaaagaataactcaacattgtagttttttactcccagatttcttttgtgaaaactaaaaacttccttgactttattgagataaatggcttttcagcatgaacattcatgctcactcataaaagcaagttctcatgaggtagtcccaggaataatactgtcttttgagtctctgaaaactaaagtattcatgcttcttgcacgtttttttttaaatcatagaattcttcaatatattattgggacgggttatatagtttggatgttctcagtctgccaaataatggcccagctgcatcagaatcgatttgaagagattaaacaaacaaacaaaaaccgaacagtttccagtcacacccctagagttttggatgtagcaggtttgaggtaaggcttggaaatctgtcatttaaaaatacctccccaagtgttttctgatgggaagttggatcacatcctgcctcatattgtggaataggtggttaaaaatcccccaaactctgttcttccattagcaagaagggtcactactgatgtgtgtgttacaccagaagtctgttcatctcagaccttcttggaagaataagtttggtttgccttctcagtggcggtcacacaagactgcatgaaagaacagtctggctgaaaagcaaaatttatattttagaacaatattaaaaacatagagccaaagagccagtttcaacaagatgagctttccatagcatagctttatcaggacttctctgctttctgttaactagactgcctggtgaattcttcatggcaaataactctagccagtgtttcgagaaagtgatttctagcctcctacactctaagccttgggaagtacaatccaatattgagacaggccgatttgaagagctctgagcctcagggaacagcgccatctgctgatgactgaggacatagcttacttgagaacaagagtcttcgggaaagcggtagatattaattatgtatgtcctggctttcgcaccacggccgctataacaacctactcccaagcaccaggcattctttcagctcattgggtgagattagtcagtaataactggtgagtgtttttattacttaaatatgaacaccattctttgaatgccatggcttaagccttaggtagacaaactctgcctataggtgttcatgcatcaaacatagaagctcagcactactggacaaggcatgacacctttgccacagtaactttaatggtttagggacaatgttcaaggagtctggttacagggggctatggggaatttcatctcctaactgtttttctttagggcccaacatcagcaatcaccagttagtgtgtgatactccgaagtttcagcatgtgccatttcctgctgaacgggtctaacagagcaaagcagaccccagggaagcccaattttggttaggttaaatccttaaagaaacgaggtggtatttttcccattggtagtttatttatgtgtttgttttaatgttagggcttatcccttctaatatcctccccaggaccaggaaagggaaatgttaaagtcatgaaacggagagagaagaaataccctatctgtgtgtgtgtatgtgtgcatgtgtgtgtaggtgtgtgttctaaaccaggtctttgaaagataaacatttgatgtagcaaaatgttgaaagtaaaagtaataagcaagtttcattacatttttctaaaaatatttggcttccaaaatcaaacccacttaaagttttcctacttttattttcttttcttagtcatttcaacatattgtaggggatttcactgtgtcataataatgttatttttacacagattttaacagtaaaaataaagttggtggaccccactgccctccacaagagctgaaagttcatttttctgcccaattcttcccacacacgtgaaaaaaacacatttaaaattaaaggtcagcacttaggctcttgtgaggtctggcaatatttgatcagagtttaaaaatctatagcatatattacaaataatatttgaaataagtgcagatggaaataattagattttttcagtttgattttatcgtttataaaatatttgaactaggcttattatttttctatatttaaaatgtgtctaattcaattttcactattgcaaggacagacgtggcataaacacatttacatgaaaactcattatttctaaactcgcaaaactttagaccacataatcccaggtacttcaacttaaaacattgcaagtttaagtaaatgaaatattatatattaataataattaatactgaaacttattgataacattactatgtaatgtttttggtactttatgtgtaataattcatttaatccttatagcaacactatcagctgggtactattgctcttcaattgaggacacagagaggttaagtaccttacctagggatgaaaatatagctagtaaatggcagagatgatagaagcatagatatactgagttagatccctttatatcccctaagaacacctccttaaatgtttccttccaggtgtctcacttcatctcatcatagccctaatcttgagatattcctgtctgtctgtctgtctatctatctatctatctatctatcatccatccctccctccctccctccctttctccctccctccgtccctccctccctctctccctccttccctaactgtctacctacctacctacctatctattggttgagcattccttatccgaaatgcttgagaccagaagtgttttgaatttcagattttaaaatatttgcatatacgtaataagatatcttagggatgaaacctaactctaaaaagatatcttagggatgaaacttaactctaaacatgcaattcatatatgtttcatatgtactttttacacataaccaaaaggcagtcttacacattttcaacagttttgtgtgtgaaacaaagtttgggtacattgaaccatcataaagcaaaggtgccactatcttggccacacttgaggacaatctatggttgtttggcatcaccatcattcctgactttgattttgtatgccaccgagaagcaattattttcttatacttattcaggcataagtacttaacagtaatataacataccattaatacaatgaaaaaaataatgtgttcaaagtagctaagcagcacggtagcatcaccagatgcctgtatgagctattaaacaacagcaacaacaaacaccagcaggctttcagtctttacctgcggtgctgtgtttcgattaaaaggttactgaaccctgtattttgtctctttaggtgagaagaaacattagaagcagttgaaggaccgggaagtaggtcctctggagatgaggggacattcttctaaatggcttgttaaaatgttaactgtagtgtcatctgtgtcattagtaactatttttttgccttagaagtctctctttcattttataaactgaagtgatttcttgttctgctatcagctacgaacatacgctgctctagtccttcgataaacccatcacatattttcagcatgtcatgtataagcactttttctgtagtgttaacaaagtcattttcattgttactattatcacaatcatctagactcagagccattttggctttttcactactgactaatgaatgaacaaccggagcctcattattgatgttaagaacttctttgttatccacctgttccaccctattgacagattctgaagatacaatttttgcatatgtaaggagatctgacatttttcttctcatctgacttttggaatccttcaaagtcaccactttgtcatcatcacaaaacatagtcataagccagagattgtgccaggcatgcacaactgtgcctttagtcaccatcttccaagcattggcaacagcacctatggcatcctaaacttttcaaaacctttcacgcccatacctctgttctctgctgctggcgtgcttttcaagaacgtgtttttatattgacttttctttgatctgaggatgccctggtcatgtagctgaatccacaaagtcacatttggaggaaagtatatggcataaacgtaatctttgagaatttggtgccttcctacagtgagctcaagctgctggtaccaaatgtttatgaaagtaatcagaaaagatgtccctggggatgcatgcttttttgttagcataatattgcactgttaaaaaattcactccttgaaaacagtgaggatgcaagcttctgcctatcacagcagggttacacttaggtgtgcccgctgccttagcacatcttagcacagttattctgtccttggcatccttaattcctgtaggagctgtctcatcagctgtagtcagtgtcttctgggggcaacaaggccaaaacagttacgttttagtagcattatagatgtgttctggagtcagattttcatcagtaatgactttagcaaactcatcaatgagtttctctgctgctttatgatcagcagatgcttatcacccagagctttaaaaatgtaatgccatgttgctgtagaaaaaaatgggttcttgtcacacaatcaggaagacttaggcacacagacacttttggaagggtgagggggaacggtgtttattgggtgaaaaaggaaaagaaaaaccaaaaagctcagcaaagtgagaagggtttctgttaacaggcccccatgtcacagattgaatcccgggtcaccatccaggaacagcagaggtcagactcctcctccctgcaaatggcacaaacttcccaagactccaccccatcgtcccggtgtgcaggtgggcattattgagaaagaataagttgagaaaagggcgagcttcatctgggactggcagtctggtttttcagccttcaggctgtttaaggcttgaaggcaggctttcaccgggggatgcttggctgccttctgtcggtatcaatgatgtttttcaaatttctccagccagcaggctgaattcttatagttccatttaattttcagtttactgtgatagatctttgcttgtttcatagtcagcatactattaagtaacttgagttcactgcagtgctgatggatccattctttcaatacacaatcaagatcttctttttcaggtttatgcagtattttttttctattttttaattaacttctgctcatcacttttggcaaaggtcctggcctgatggggcatcatgggaaactgcccttggtgtgtcccactgcacacacgccattttattatcatttgtgggaaagcctgcatgagggaatctgggcatgtacagagaaaatacaccaaaactgaagttgggtaggagggttctatttcccccatgcggatgctgaataaactgtgcgcacttgcattttgactgccacatgtcacatggggtcaggtatggagttttctacttgtgacattatgtcggtgttcgaaaggttttgaatttgggagaatttctgattttggatttttagattaggaaagctcaacctctttatcgtacctacctacctatctctgtatctacaatcagtatagacagttagatatagatgtaggtatatacgtggttagagcaacagcagcccagacttttggcaccatggaccagttttgtgaaagacaatttttccacgagatggggtgtggagggggatagggtttggggatgaaactgttccacctcagattaacaggcattagattcccgtaaggagtacgcaacctggatcctttgcatgtagagttcataatagggtctgtgctcctataagaatctaatgccattctgatctgacaggaggtggagctcaggtggtagtgcttgcttgcccactactcacctcctgtgtactgcccagttcctaacagcccacaaaccagaggttggggacccctgggttagagaaagagagagacagagagagaatgaatacaaagagggatattttcaaatagctggtagacaggttattgaatggtctcaacacaaagaaatgataatgtttgagttgacacatacatgaattaccctgacctgatcattatacattgtatatatcacaatatcactatgtaccccatacatatataccccttgtcacatattatgtgacagttaaaataaatacgttgttaaaaaggagaataatgcaaaaaatataagtatgctatttcctttttttcctttctgtattttatcttcttctttatttgccttcttgattaatcatttcctagaggctggtaatcagatttggctcctgccctccaagatctgtcagtttcataaactaactcacacatgcaaatactaatagctttaaagtgctgagtgctagaatatgttcccttcagtggtaaagaattggagcaaattcttccacattgtggtgtggggtaaagaggaaaggctttcatagaagaggcagcattttggttggtttggcaggtagaaataggaggagagtgtttcactgagacagaggagcccaatgagctgtctgcatgggggtggaggaggtatgagtgaaatacacaggaagagaatttcaagaaagaggtgggaggtgggggcaattaacatccttaactgctgcagggaaaacaaacaaatggctgagaaaagaccattaatatataagcattttctgatacgtgagccatgcatacaattttaaatatcctagtagtagtcacattaaaaagaaacagataaagtttaaaatgtattttatttaaccctttatataaaaatattatcatttaacatgtaataaatatacaaatttatgttttgcattcttgattctgtactttgaaatccagtgtgtatttcatacttacagcatatctcaatactaaagaaccacaagtgctcaataacagcaccctgtggtttgtggctactacattgaatgacacagatttagacaacagcaaaaaaagtgtgagtagagaagtggaaccagaagtcagattctaaggaattaggggagagtggatggtaaagacatagggacagacagtgtgtattacttttttccaaacacttggagagcaaaaaatgacactgttcttttattctctctttaagataactgagatggtaatacatttcatggaaagggtcaagaaatttaaaaaaaatgagaaattgcagatatgaggaggaagttatgaagccagcatgccatactgagggttaagacctagagggtctgggactactagtgctagtctttttgttctatgtttggaaatggactacagccatgcctggtgacaatgcaatctgcttattggctcttgtcattaacaggactactacccaaacaaattaccttcttataggaatcagggtttgcaatccttgggagacagaggacccattgagagcatggctggcaagtttagtttcataaatgagaaatttcttcttttatatgagaatagaagatgactggttgtgaaagtataagttttattctaaaaacacagcatattaggagatatctcctcttttcattgtcagattccactggtcattcatttagctactcattcttcaacaatacaaaatatttttgaacttctatagtttattcctgaaacttacattcaatacaacaattctttccttctttcgtttaaaaccttaattgaaccttctttctccctttctttccttgtcttttccattcttttgacaaacttagggcaaattttgaagtcggtgaaattgattttgggtatttttccgtcttgttttatctaccctctgttctctggtgctgacttatacttttttgaccttgctgtaaaatccaagtcttagccaccactattaacactgccaccaccatcgtttccacccgcaccatcattaacaacaattaagttctttttatctggttctatttttctcaacctcattagatattaattctcacagagtgaattaatataaatatactgctgtggtctgaatgtttgtcttcccccatattcatatgtcgaaacctactttccaatgtgatattattaggaggtggggcctttggaaggtgattaggtcatgaaggctcagctctcatgaatcagattagtgcacttataaaggaggctctagagaattgcctcattcttccctccaagtgagtttatagcaagaaagtgccatctataaatcagcaagcagccctcaccagtcaccgtatgtgacagcaccttgatcttggatttttcagcttccagatctgtgagaaataaatttctattatttaagccacctagactatagtattctgctacagaagattgaacagactaagacatctattaatgattttgatgcccctaactttaccaaaagcattggcatcataaaaagagaatgattattaatacaaatggatctttatttttttttaaaaaaaggaatgacaatacatttttttttttttttttttttttgagacggagtctcgctctgtcgcccaggctggagtgcagtggcgggatctcggctcactgcaagctccgcctcccgggttcacgccattctcctgcctcagcctcccaagtagctgggactacaggcgcccgccactacgcccggctatttttttgtatttttagtagagacggggtttcaccgttttagccgggatggtctcgatctcctgacctcgtgatccgcccgcctcggcctcccaaagtgctgggattacaggcgtgagccaccgcgcccggccgacaatacatttttcaccaacattttatacaactattttcagacataagccaagttgaataaattttacagtaaacacttgcatatcaactacctagactctaacatgaacatttttctatattgctttttcacaaacctatccatttatcgatccctccatttttctatacttcatcttagttttttgtacattttaaagtaaattgcagatgtcaggatgctttcccctaaacactttagcaagcatattatcaactacatttcaatatgtcttttgaagtggaatggaatagtaagcatattttaaatacatagacctgtgtaacccaaacctctatcaaggtagagaaaattaccatcatcccaggaagttccctaagagcaatcttctgatgtttttcaccatagatttattttagaattttatataaatgaagcttattgtactcaacataagatttccaagactcagacaataatatagacagtggtgctttcaagtctgcagcagttttgttccttttctggagtctgccctttcagaagagctcattgctcctccccttagttcttcttgctcctcttcctaccccctgctcagtttgtatctcctttctttttttctaataaatacagtttcttttaaagttctagatgttgtcattgctcttactttgaatttctataagggcttgtaaagcattaggatgctcacacatcaggaggaacaacgttttattctttaccattgaactagtaatactagtttttccttttaggatgacttcattgagtatatattaaaaataatggaaaaatagcaaaaaggaaagaacatatgtgatgaatccgtgacctcatgatatcttattgaggctgggagcatttgaggtctgagattttctggtatgctcaaggccagagcagcaacatgcatcctttcaaaataaggcaagttgtcacttgtctctggccagaattggtcaagatcatggggtaggtgatgaatgctgccgacgtcccatgacacagctattgatatgtggcaaggagccactcatctctactaagagatggcatgtaccagagaggggctgtgggagtagatgactgtccaccaagtagtgtgtaattcaagggatgtctcaatgtcaagaagttacctttgacgtcacagattggccaatgccttcatgttatagcagaccatcatattaggaaaagtcagtctttctagattgaataaggacaagtccagggtaagcgactactctagaaacctaacctgtaatctgaagaaatgaaaagtaaaatgtccagcaataatacttcgggggccttaaacctcatattttcttgagcatcttgtttcctgtttaattgtcacagctcaaatattatgttttgcaaatgtatgtggggtgtattttatatgttatacatattaatttattttcatttattctgcttgaaaatttttacataaaattaaagtctgtcataatactttatcttctgtttgtggttagagtaggtgtctttactttctttatgatctctttgttcaggtaagaagggctatactggagtgaaatcataactttagttacatcgtaacattagaaacgggcacactcttgtaaacaactgcaacaaatggagattatgcttacagcataaacctcagacttgtgggtattttcttctttatgttttaataaaaataccggaaaggaaaggtttaaactcactagagttattttgagaaaatcgatttccataaatatattttattgctcactcataaatttatacttccctttctctcactgcataattggttggtttcctgcatacagtttagctccatcgttcatgttttgataggaattttatccctggtatttgtctgttccagccattctttctttctttttttaattcatgaagcctttttaaaaattatttaattttatttttattttaagttctggagtacatgtgcaggatgtgcaggtttgttacataggtaaaagtgtgccatggtggtttcctgcacctaccaacccatcacctaggtattaagaccagcgtgcattagctatttttcctaatgctttccctccccatgccctcaccccccacaacaggccccagtgtgtgttgttcccctccccgtgtccatgtgttctcattgttcagctcccacttacaagggagaacatgtggtgtttggttttctgttcttgcattagtttgctgaggataatggcttctagttccatccatgtccctgcaaagacatgatctcttcctttttatggatgcatagtattctatggtgtatatgtactatattttctttatccagtctatcctcgatgggcatttgggttgattccatgtctttgttattgtgaatagtgctgcgatgaacatacacatgcatgtatctttataatggaatgatttatattcctttggatatattcccagtaatggacttgctgggtcaaatggtatttctggttctagaactttgatgaattgccacactgacttccacaatggttgaactaatttacattttatatttactattctaatttactattttctaatttactatttctctacaacctcaccagcatttctggtttcttgacttttaataattgccattctgactggcatgaaacggtatctcattgtggttttgatttgcatttctctcaccatcagtgaaattgagctttttttcgtatgtttattggcctcatgaatgtcttcttttgagaagagtcttttcatgtcctttccccacattttaatggtttttttttcttgtaaatttgtgtaagttcattgtagattctggatattagacctttgtcagatggatagattgcaaaaactttctcccactctgtaggttgtctatttgctctgacgatagtttcttttgctgtgcagaagcgctttcatttagttagatctcatttgtcaatttttgcttttgttgcaattgcttttggtgatttcatcatgaaatctttgcttgtgcctatgtcctgaatagtattacctacattttcttctaggctttttacagttagtgttttacatttaagtcttgaatctaacttgagataatttttgtataaggtgtaaggaagaggtccagtttcaatttcttgcatatggccagccagttcttccagcaccgtttattaaataggaaatccttttcccattgcttgcttttgttaggtttgttgaagatcagatggttgtagatgtgcagtcttatttcttagttctctattctgttccattggtctatgtatctgtttttgtaccagtagcattggtcagccattattttagtaaaaagctgaagctcttcactacctgaagaataaaatccaaaattcttagtatggcattcaaggctttccagaagctggcacgaaactgtttttctaatttttcttctgctccagtatttcttcccagtttccttccacttctttcacagttcccatcattcttgcattctttgttgtctctgtgtacaatagctttttttttggtacaattttataacactatagttaggggagtgtatatccacctacttatgttactggtggcttctgtgtcaggaaataatctataacctacctacttattcttttgatgtagatgacctacccattcacctttttaaagaatgtttgtaaattgtgggaaaatatacatcatataaattttgccatcttaaccatttttaagcattacagtatagtgccattaagtacatttacactgttgttcaatcatcactaccattcatctctaaaatacttttgtcattccataatgaaactctgaacctagaaaacaataacttcccattctccccttctcccaggccctagcaaattctacttcctgtctttacgaatttaactactctaggtacttcacatacgtggaatcatacagtatctgatatttcacttagcatagtgtcttcaagtttcatccatgttgtagcatgtatcagaatttcattactttttaaggttgcataatatttccttgtgtgcacaaagcacagtttgtttaatcattcatccattgggggaaatttgagcagttttcatcttttggctattaggaataatgttgctatgaacattggcatacaaatgtctattgaagtcctggctttcaaattttttgtatgtgagtagaattttagaatcaaattatacttctacatttaattttttgaaaatcataattttataaaatcatactgtttatcataatggctgtctgaactaggtaacatttcagccaacaatgcacaaggcttccgatttattcacattcacgccaacactaattgtttttcttttccagtaatagccattctaatagatttgaacttgtatctcatgattcttatttatatttccctaatgattagggatattgagcatcttttcacatgcctattggccacctgtatgtcttctttaaagaaatgtctattcaagacccttggtcatttttcaaatgggttttgttttttgttgttgaatattaattattctctatatattctggatatcaatcccttatcagatatgtgatttgcaaatattttctctcattctgtgagttgccttttcaatctgttaattagtgtgttttgatgcaaaacgtttctaattttgatgaagtccaatttattaatattattttcctttcattgcctgtgcttttgtgtcttatccaaggaataattgctaaatccagtgtcatggaatttccctcctatttttttttcatataagagttttatactttaactcttctgtttaggtctttggtctatttttagttaattttgttattggacttaagggaagagaccaacttcattcttttgtatgtggacgtccagttttcccagtgccattgttaaaaatatggtcttcctttttaaatgaatttggtattcttgttaagaattatttgaccacatcttcaagggtttatttcttttttttttttttttatactttaagttttagggtacatgtgcacattgtgcaggttagttacatatgtatacatgtgccatgctggtgcgctgcacccactaacgcgtcatctagcattaggtatatctcctaaagctatccctcccccctccccccaccccaccacagtccccagagtgtgatattccccttcctgtgtccatgtgatctcattgttcaattcccacctatgagtgagaatatgcggtgtttggttttttgttcttgcgatagtttactgagaatgatggtttccaatttcatccatgtccctacaaaggacatgaactcatcattttttatggctgcatagtattccatggtgtatatgtgccacattttcttaatccagtctatcattgttggacatttgggttggttccaagtctttgctattgtgaataatgccgcaataaacatacgtgtgcatgtgtctttatagcagcatgatttatagtcatttgggtatatacccaataatgggatggctgggtcaaatggtatttctagttctagatccctgaggaatcaccacactgacttccacaatggttgaactagtttacagtccctatttctgagttctctattctctcctatctgtgaaaatctctgtatttatgcaagtgctgcgctgttttgattactgtagctatatagtaaattttgaaatcagaaagcacgagtcctctaactttgttctttttcagcatagttttggctatttaggatctcttgagattccatacatattttcaaatggatttttttctatttctacaaaaaaattggtattttgatagggattgcaatgaatttgtaggtagctttaggtagtattgatagcttaacagtagtaagtattcaattcataaatacagcatgtcttttcatttacttgtgttctttgatttttttcagtaatgttttatagctttctgtttacaagtttttatctgtttggttaagttgattcctaagttttttgtttgatgatattataaatgaaatttctttctaaatattcttttctgattattaatttttagcttatagaaatacaactgatttgtttgttggttttgtgctctgcttgatacattactgaatttctttattataacggtttttgtgaactcttcaaggttttctacatataagattgtattatctgtgaacaaagataattttacttttggataccttttatttatttttcatgcctaattgctctggctaaaacatctaatactatgctgactgtaagtgttaaagcaagcatctttgtcttgttcctgatcttagaagtaaagttttcagttcttccacactgagtgtgatgttgtttgtaggtttttcatatgtggtctttattttgttgaagtactttcctttgttctcattttgttgagtgtttttatcatgagggatattgaaatgtataaaatgctttttctgtgtctattgatattctcatgcttcacccttttattctgttaatgtggcatattacaataatttattgtcatatgctgaaccatcctgtatctcaataaatttcacttggttatgttgtataatcactttaatatgctgctgaattcagttttctaggattttactgaggatttttacataaatgtttataacatatatcttataatgtcttgtctggctttggtatcagggtagtcctggcctcatagaatgagttagaaagtgttccctcttctttagaagagtttggagagaactgttgtgatttcttctttaagtatttggtagaattcaccagtgaagcctaggtctagggtttttctttgtcaaaaggtttttgattgttaattcagcacccgccccccgccccccaccgccccgcacaactagttagatgtatttggattttctatctctttataatttattcttggtatatttatatgaatttcacattttgtctagattagccaatttgttgacatacaattgttcctaatactctcttatatagatttggtaattatatccctactttcatttctgactttagttacttgagagtaaacatgacactttgtaaaaatatttagccagataggatattagacaggacaagagactggaagggaaaaataagacacatttagttctgaatttttgtctgctctcaggcaaaataggtgatgagcatccccaacacctatatccaggtacatgtccccaaacaggaatcttcaaacccaaaagtgagatggatcagaggctagtgttgttcatgatctgtgtgttactgtggtcagcttttgtcactgaaatattgtgacttgaaatcatggttttttccctccagtattatcttctcaagtattttgaaggcaacgtatatggttgagacaacccatgaggtcccctggatagattactggtaatttttgaaagaggaaaacatgaaggagacttcagtttttcctttttttctccatagattcccatttttatttcctgtttgtatttcacagagcactaagaaggcatcagtgaaacgcctaataaatacctagtatttctcaaaatcaaaagtttcacaactcagcactccaggaagtctgatttcattgcttgtttatatgtttttctcccttttaccttaaccaaagctgccttttgccaaatttgaatgaaatttgcccctcataggatttcagcttgaaactgaattaagaagccggaaagacttaaaataagcaagtgttttaaatgctacacaatgtatctatttttttaagtggaagtttcatagtatttaaagccaggtatataaaacaaattgcaacacatttcctcaagcaaccacttagagatcataccaaatgaacttaaaaaatatgtttaatgagtaacatggaatgtgcttaaatgatgcaatttatcagatttttttttcagataaactttctaccagcttcctccagtacaaaacactttttattttctttttaaagcaccaaactttattcctttccccgccacctccctttttttttaaagctctttcaggtggtggaaggtctgaggatcatttgcactaattatttttagttcttcctcacgtaacacctgaagaggacattctatttatgggaaccaaattacttaaaaatatttccaagctctttaagcagaggtcagtacacacattagctgggggcaaaaggaatattcaagcctaggcatcccttttgaattcacagctgggatttatgcagctccatgctgttggcctggtccccttggttaccctccaccttgctcataatatccagacagcatgtcagggcccatctcatctccacatatcaatagatgtttgtggaggatcagctgttcccatggtacctgggctccgggatttgtgttggaatgtgctgtgtttcccagactctaggttctcagcaactgctcatataccatctcgagtctctgcacctactgagtctttccaggattttgtgttgctgcactgacaattttcacactcttgggtcctaacccccgattacaagctgtggggattaagaaattcctccctgagacctggttgcacttgccttaattgcccatttgttcttctctgggttgatttttatttttcctcccctttagggtaattttgaaagaagctctagttattattttcctcattctaaataattgtgataaaacttttgaaactgcactacttctactggagaaaagatagaactttattatcttgcaggaaaagaccaccttgcatgcttttcatcttattttcttgactaggggtttaatatcatttaaaaatcccaaactggatcgccatgatctcatgtaacagtaaatatagtgtagaaatatttttgaatacaatgatggatacaatgtaaataataagacatttgaaacaagcattttattaaaataaaaacgcttacctggaatcatgaatacacttttgagatggttacttatataagaaatatttaactcctcaattttaaaaacatgtatattgtgtgatagtgcttcggtttaagtctgaaatatgaatttaaaaaagaagaataaataaagaagaaaatttgggaaaaaaagacctagatttaatataattagcatgggaattgctgaaaatagagattcccaatttggacccttggtagagttaatttactagacaggaaagaagaagacaaaaataaaatagaacaaaaaactgagatgcccggatacatttaaattttagataaaaataatttttaagtgtacgttctaaatattatggaacatacttgtattttttttcactgtttatgtagaatccaaatttaattcagtatcttgtattttatctgtcagttttaatcactagagacttcagttcagtcctggtgggtgggggccaaaactggtgtactttttataagctaaactctgcatgaattctaatgagaagccaggttagaaaaccactagcttattgtttcaaaatggaagacacacgcacgcatgcgcacgtgcacacacacacacgcacacttaaaacagacacaatggtgatcccaaagtctgtgctcctggtagattcattctgcaaatgaaaaaaatatatattatctgaagtaaagagaggaatcaaaattcacctgattttgccatgaggatcctggtacaggaggcaaaatactcatgcattttccaaattacagaatgtgctacagactgacagagttattcatcatcatcattgttttggctggctaccttaaaattttgttgtcaaacattgttggttaccattggatattcttgttaacttttatgattgatagtgagttaccatgaggttacaagtaaaacccaacatattatatgtagtcaactagcttttaaaaacagactacaagagaacacatagcaattaatttaaccttaacataaattagttgatttaattgattcactatatatctattaagtgcttggtatgttgaaaagctggggataaattacaaattagatagagccccaactctccaggcacttaatggtttagaatcacaagagtttcctgcaggactttaagtctcacatgacatgttgattatcatagaattttatatacaaaatgccagagtagcagaacacctggtttaaagaagctttctcattaaaaaaaaaaaaaagaagaagaaaataaaaaaaagtcctctacattttaaaatgtagcagccttaatataaagcttcagaaaggagaaatccttttatgcacttttgaggctgcatggtttgggaaaaggaagattactttaaagttctttgtaattactggatttatttaatgaagaactagttacagcatttagtactacatgacatgtttttgttggtcattatcatataaaactttttctagattctttttttctgttggagtatccattgtaagcattgtaatatggaagggctgtgctacgtgatgtgagtcacactcatcgggacaggtgggggaactgcaggctccttggtgtagaagatccagctcagtgtgcagccatttcaggaagacttttctgaccacccactttgagctctccttttttaaacatccatactacttctcactggactagctaatgttccaaaaatctcttattgatgttaaagtctggcagttcagaataatatttgggagtgaggaggagcaagtaccacattatagtcatgttttgaatttcccagagagcctccttcatctagatgtggtccctgagtcttctatcacctgagtgtttgacctggatgtcactttgaagatcataacacagaagtaagccttgtggaagcaagtgcctttcacagcaccatgggtgtgccctgagaaacagaatacaaggtaaaacctcaatgtgccaggatgagtgaggatttaggggtaattattctttctggttcactggaaaatgtctttctgaaaattaaatctattacaatatgaaagttgctttgcttactattctggcttgtacaaagaagactaaagcggagcacctgctctcaaagatcagataattcaggtgaggagttaaggcaaatgtgaatgaaaatttaactaacaagagagttaattaggcagcatgggaaggcgatgtcttttctgaaaaagagatattgaaggttagcttcccattttctacagcagcttatttccctgcactgataaataagaaatggtaaatataattgggtcattctttcaatataatatcctgtggcatattaggtcaataataccaataataacaacagccacttatagagtgcttaatacttctcagtttaataataacttttgtaaattaacaatttaatcctcccaacagtccagtgagccaggagctattacccccatcttttggaaaaagagaggttaaataacttgcccaagtttacacagccattaggtagctgagccaagctggctccaaagcccatgcttaataatgatttcattctgccttctttgcttctgtgtatcaactcttattgtgccttctaaaaatataaattccagaaaattttacctcttcttttgtctctttatgctatagtcaattgaaaggaagaacatctggtgagtagaaggttcttacaagaaacactctgtttctaggtaattgaagttttatgtcagtgaggctgagagagtacctaggcaaggtcagtttatatgagatggaagcaaaacaaactttaatgtcgcctgacagtccatgggcaacagaagaggttttctgagatatcagaagaaagtacagcttcgtggaggaaacagaagaaagtacagcttcgtggaggaaaatgcacaatcttattaggaaagaggcatttctctgtgaagactcaagatgatttctgtgtggaagaattatactgttaataacaaataggggaagcagtgagctgtctccggctttgtaacatctgttataactgcacctgcctcaaagatttcctggttcctattcccaagagaaagtcagtcagcaggaaatgaggcaagtgcacaatgactttacgggaaaaagatggcttttgacttctccttgggcttaattcctgacaatattgcatattccccttgttgttgatagtactttacaaggcagtggtttgtaaagtgaaagatgggaaggaagaaagggacctatgcttggaaacagtttttatggaacacaggaatgtcatagggcacgggtcaattgggtgacatcaatacatctggctgttagtccttgctctgactgaatgggtaatacacggaaacaaaacatattcctactcaccacaacaattcaaaggctcacacctgtgtctcctttcattctctaatgtagtgattcttagattcccaaactttagagtgaatcaggatcacctggacggcttgtttaaccacacattgcaggacctgatgtagtttctaacacaatgtgtctgatgtggtacctaggaatctgtatttctgcaagtccctaggtgaggctgaggctgctggtctggggattacatttgagaattattgctgtgattgatttaaacagaaatctcccattcttattattcttgggcctctctctcatcaggatgatccagttcccagggattttcaccatttcttcctatcaggacgattgagcagaatctgcccctcacttctccaccgaagtcccagcagcagcctcagcatttatctccaacttggatgaaattaattaagttacattcaaggggttccagagagaagttgagtgcatgtagcctgcctaagctagtacaatggagcaggcatttccccaaaggcctcactatattggatggacatcatgttttacatcaattttcctggagtaaatctgctgcagatgaaatgctaacattgtccactgttagtatatgaaggcttggggaaggacattagctcccccttatccttgattttgtttcttacacttgcagttacccacactcaactgtggtctgaaaatattatgacctttatgaaaaagttcacaaataacaatttataagttttagatggaacactgttctgagtagcatgattcctgcttccatctcacccctaatgtgactcattcctttgtccagcatatctgtggggtatatgttccccacctgttagtgctggacatcgtctgctcctgacatccaatcaacatcaacatggcttgacgatccaggatcacccgaagcaaatggtcctccgactggagaatcttcagaaagtcaactgtagcctaacgctatgtcacaatgcctatgtcattcacctcacttcatcgcatcacgtaggcattttatcatctcataccattacaacaagatgaaggggaagtacagtacaagaagatattttgaaagagaaagaccacattcacgaaacgtttattacattatattgttgcaattttctattttattaccagttatgattgttaatcctttgtgcctaatttataaatttgttaatggttaagtatatataggaacaagcataccatatatagggttcagtactatccttagttttagggatccactggggataagggggaactactggacctaaccttatgcttacgtgaagagcccctaaggtcacttgcacacagaagctatttaaaaatagttgttacaattaggagccccctggaatataatatgtgtggcatcacttaaagaagtaaaaagaaaggataatttttatttccctttatatttagtaaaatatttctctacaatattataattataatatttatggcaaaattacattaataattttcacataattttaaaaagtgaaatatctacatgtaaggcaatacaatattatgattatttaaatatttaagcaaaatattttctgttcatataatatagtcacacgctgcataacaacgtttgggtcaatgatggaacgcctataagatggtggtcacataagattatagtactctattttcattacctatgtctagacatgtttggatacactgatacttactattgtgtcacaattatatatggtattcagtatagtagcatgctgtacaggtttgtagcttaggagcaataagttataacatgtagactagtgtagtaggctatgccacctaggtttgtgtgagcattccgtatgatgtttgcacaatgatgacaaaatcacctaatgacacatttcccgtaaggaattccttttattaagcaatacatgactgtactaatataatacatatactctgttgatatttaatatttcatcagatatcaatatatcataaaatatataattaaacatataataatgtattaattatatttgattattatatgcaaagtcattttaaaaagtaaaatatgtaaatgcaaagcatacagaaaatatataaaaatattacatgtaccacgtgtgttcatgttaataagcaaattgttgaaagttaatatctctatattcaagatatagctattaaatatgtaatacataacattaatacacattacacatgtagtattttatttattatttctaaactgtcacttgttttattactcatatctcagtctgttctgccacattggtgttaggaaagttattgccaatcttattgggatgacaactgaaatcaacaaatatcaatggataatgggatgtttactgcatttcctcagtacagtaaagaatgaaaatcctagtcttgggtatatattcagtgtttttctttaaatatatgttttagaagggggcaataattaacattacgttttatttctaaggtggatactaactacaaaggtcataagcaccataagcattcacattttcaagaaataccaagacatgttctcagggacaggaagatggactttccaggagtcaaaattttaatgactgtcttccctctgcatggatgtttcctcaggctgccttttggttacttcttccaggtggatggttccaagagactgtgtagggggttatataagtttgcttgggctgccatagcaaaatacaacagactgagtgacttaagtaacagaaatgcatgttctcaccgttctggaagctggaacgccaagatcaaggttccagcaagggtgatttcctgtggggaccccaggggacgggtctgcttccacacctttctccttggctggctggactcttgctgcctcctcaacatgcttatctacccctctgtgcacagctctcctggcatcttttcctttccttctaaagatgccagtcaggttggccttactctaaaggcctcattttaacgtaatcacctcttttagaatcttatcttcaaatactgtcactttcttaagtactgcagcttgagagtttaacacatgaatttggggacacagttcaggccataatagtggtagtggaggagtaaaaatcatatagatagaacagctggcttcacttccgacttttcttgcaattataactcagaaaatggcgtataactcaggcagcacatattctgtttttgatgccccaaacatttccaaagagagtacagtggagaggaaagtatgctgactgcaaatagatagcttttagtcttggatttataatctataggctgtgtgaccttattctgtttaattaacttctctgagactcggtttctccctgggtaaaataagactattaatcgtttgctacaaaacagggttgatctagtgagagaacattcttaaaaatatctaaaaattctaatattcaatttagagcttaggaataaattttattagtttactttttaaaattcttttgaaaatgtgacacatgtacatggtaataaaaaaaattcaaacagtacaaaaatatacacagtaaaatcttggtctcccacctcccatcactgggctcccattcccagagttaactgcctgttaggtgcttcttgttcattcttccagaatgagtcaatgtggatatgcataaatgtatattttctttttatttacacaaatatgatagcatgctgtacacattattctacaccttgcgttttgcccttaatatgtcttggaggttagcccatgcctatacatatgaaaccaactcactctttttaaccagttgcatagtagtacttgtatggctgcactatcaataaaaaaaatatgctctgtggatgggccataggttattctttagatttttgctgtagtgaacttgaaaaaaatactgcagtgagtattcttcaacatgtgtctttatgtacacatatgtgtatttgtaagataaattcctaaaataaatattttactcaaaaaatatctaaaaataccctggaaagcctctatatacaatcaggctttaaagaaactgaagggattattataatcatcactgtgtgtttgattttaagtgattgcccatttaaaacgcttgaagaattaaatagagccacgtttaaatcagtcaccattcatagactgttctctgtgcacatgactttttccataggggttggtaattaaccattggttcaatattcattagtgaatagttttagattagtttctgtcagttacaagtcttgctaggactatataatggatgataccaatgtttattttggcaaaatattaaagtataagacaaacataataaatatcttggtgtttattttttccttagtgggagcaccataagctgttttttacccatcttcagatgccatgcgctgagcatttttatttgctattggcagatcctacctgctttcctggtttccttcatcattctttcctttctcggttttccttactcctgcctctcttcttcagcttctctcttctcccatctctcccttcttaccctatccactctctcctttctccagtctcccttctctctaatcttttccattttctctcgcttgtcctgtcttttctctcctcttatgtcttcccttttcaccctacctttcttctcttctctcaaaacaacatctttttaaaagatagattttcaattctttttaccgtagtataaacatgttttaaatataaaatacccgatcaggtgttttccctgaattcaacaactatttaaataacacctgcgatttacatatatttaaataaatgtctccagcaacccctagtggaatggtaggcatcagggaatagatgtggaaggactttgcagttgccgcaaggctttccatgtggttaagttcatattaccagcagacatcaactctatcaattcaaaagttctcctgcagccaggtgagttaaaacttttgtgaaatttctacactgtttcaatatattaaaaatactctatctcagtgagagtggagggaggaagtttcaagtgtcagctggcagacatgacagaaatgaacagtctcaacctactcaacagttctcaaacctactggtataggaccaagccagaattttaagcttaaaacacagattatcagcacccctcatatcttaggcacatgtttgttttctccaaagcatttcttgccatattaatttgagctttataaaattaaaatctctcagcactgaaatcagcattgcagattttcctattattctggttctttgtaggaaatgaacagtgaagaaccatctcagcttgtcagaaaacaatattcccaactctccgcttcagctttttggatttcatcctatgtacaaaatagcataattaacattcactaaaaatttcttaaattacaggagaaatatggcttaacacttcttgtctagcccaaagaaaataattggtatccgaataaagtcatcattaaaagtaataaatgtgcaaagcctggaaaaatcattttgaatatttcaaaacaggacaaaacaggaaaatgtctggtttcgcagcattatttaacaaacacacactgtctgttcaggagacctgcacctcctcaatcatgaattaaacattgtcttgtgatgtaccttctaatgatggtataatccatgacttccaggtgtggtttcagaaagaattttaaagcaaagctttgtatagttctaaatgctacacatattaattaccaggtttatcttgagaaacaggtgaataagaaaaggcaaagttgcatgagatcctcagactggtaaaacgaaccattcctgaaggcaaacaagaatgctgctgctttgatgggcacgggcgatctgttctgtacacattaaaggcagcatcagggcacatgctaggttaaattttgaagtcatggaattggatcatcatttattccctagctatctctttctatatgtttctgcatatgtttccacttcagatttctgtagtccttttttcttctctctttgcctactcacatatgtaaatttgttctcatggctattggcatctcctatgtaaaaatggaatttcaggtatcaatcccaggaaaagtactattgatatctcactatccaataaccatggcacttctacttgtcaacatccctgtagaaatggtatatcaccatcaatatcactacaatactcgtatctccattaaggtatccatattcacacctactgccgtaagtctacagaagtgagttgtctctgtaaaggaccttgcagcaacctcatttttattctatctatagacagtctaactgcttgttggttaaaaaaataaagaaatggataaaatataactatgtgtcttttcagagtgtcatagcctaagcaatcctttacatagtaattccaaaattaaaatttatatctagctctttatatctctgtgctgagttttataaaatataaatttcagaaatgggaggactggaaataagagtaaaggagctttcataaaagctttaaaatatagcaaaaatatgcactggactgtcttgagtttacctgattcaaatatctgcccattgttgctctaactacacttgctatcgcccattatttatcttgcttcaattctaaaggttgtgattcaaaaatatcattgagcaatctagaaagatgtaggtgaatcatgtctcaaaactatttcagctgtacacgtttctttcagactgcaatgtcattgaactttcattccacaatgtgtataccactacattacatttggacagttgaatgaaaaatatttctctttcaaagatttgttttaaattctgacccttttaatatggtctaaatcctctttgcctcagtttactttcctatcaaatggccatgttaggtgaggtgatatctaaattcccttttagccataatcattttgtgaaactgcgttgaatcaattgtattctacaatagccctggtatgaggagaagaaaggaaatctacacaatataagaaagagaacatgaagttaccaatgtcacctttcctggctgtgctgtcacaaggatttagatttgcctattccagacatgggacacagagagaacaggcagaaaataagggtgaggccagtacaaagcttataaacctacagatattttcaacttttaaaagagttcacagagctaatatacatagaagcttattcagattgatgattgttgcatgggaatctatcactcaggtttggtatattccaggtgaatattttcgaggccattgtttatcatccttctttatcaatttttgaccacttagtcatttggaatatcatgagttctaatcccaagaggcaaaaaagtgaagtgagaggtacataatgtgctatatagacacaatagagtttgtgtgtatgtatagatatatatgtatgtacatgtagagtgtgtgtgtgtatacacagagtgtgtatacgtatactacatatgtacacatatatatatatacatacatacacatacactgataacatgtacaagcactctatagacacttacagctcctggtcaacagcctctaaaactattaagagaaaatgttggaatcaatacacaaatagagttgtagggcttatctcatgcttttctgcacgtataccttaatttcccagattttcgtattcattgtcctttagcctattgttaagtctgtggaatatctgcttttgcctatgggtaaggtaaggaaatggctacttgagaatagaataggctggttttaaaattataagtaactttttctactttatgggaaatttgtttcactgggattacatataaatttttctaaacctgcttgccacctcttagaggatcttttcagtgtaaagactgaaggatcctctgggatggtcaaaaaaaaggtgatcctctaaaacaaagagtgattagaaagtccagatacaataaacatacatgtacatgtgtctttagagtagaacgatttatattcctttgggtatgtacccagtaatggcattgctgggtccaatggtacttctggttctaaatccttgaggaacctccatgctgtcttccacaatggttgaactaatttacattccaaccaacagtgtaaaagcattcctatttctccacagcactatttacagtagcagagacatggaaccaacccaaatgcctatcaaaaatcagcgggataaagaaaatgtgttatatataaaccatggaatactacgcagtcataaaaaggaatgagatcatgtcctttgtggggacatagttgaagctggaagtcatcatcatcagcaaactaacacaggaacagaaaaccaaacactgcatgttttcactcataagtaagaactgaacaatgagaacacatggactcagagagaggaacgacacacactgggaccagtcgagggctgtgaggcaaggggagggagagcattaggacaaatagctaatgcatgtggggcttaaaacctagatgaggggttgataggtgcagcaaaccaccatggcacacatatacctatgtaacaaaactacgcattctgcactggtatcccggaacttaaagtaaaattaaaaaaaaaaaaaaaagaaagaaagaaattccagacacaaattgtggatttagaaaccagagtaggataagccaggagagaagtttagttttgatgcagtaaaaaacaaactaggaattaatcctttaaagaagtataaaaataaatcgcgatcaaggaactcgctggagtataaattggcataagtagatactaaagtctggtatttttatactacccagaaagctattataataattcaagtgaagggtgaatgaccacaatgttgattaaaaaaatagatctgtagaagattactgataaagtacacatgtgaaatcaactggtccagtggcctctgcaattatatggaaagctttattcatactatacacatctatgtctttctcctgctactgaacatttttgatctaggtcaacagttcatgttatagagacagtgactcagagaaagtacgtaagtttttgcaaatcacagtgttgcttatggccaggtgcagtggctcatgcctgtaattccagcactttgggtggctgaggtgggcatattgcttgagaccaggagttcaagaccaacctggacaacatgatgaaagcccatctctacaaaaaattagccaggcattttggctcatgcctgtagtcccagctacctgggagacaaaagtgggagggtcaattgagccccggaagttgaggctgcagtaagggattatagcaacactgcactccagcctaagtgacagagtgagaccctaccttaaaaaataaataaataaaaataaaaaatttgtgagactctaccttaaaaaaaatttgttgcctatgaacatactgcgagcagcataaagacacttgcattgaaccatcctgaacacaccaggattcctttctttggagagggagagtgttttctcttaaagtcatagaattgggaagccctttgaatcttcctgtattatttctaaatcaaagttaaatactatcacctccttcaattttaaatgcacctgcatgccacccaaatttgtacattcacaccactaaataactgaaggttttgaactctgcttatgtgtaggaaaacatagttatccccagtagcatcccttctactctttgagaaagttgggctgaacatttatttatttatttatttattatttttaattgatctgaatcggtttattccttccctctggctctgtgaaagaagtatatttgtttgtacagtttttgttagggtccttttccatatttccatgaaaatctagatggtctttattatctacatttagaaaatctcaaatgcttttttcagatgcagcctggcagagttttggtcccaagcaaatttcaggtggctgtggcctaaatattgcatctcatctgactgatttgagttacaaactaaacagactgtaaatggaatcttaaaagtctcattagaatattgtcggggaacccagatttgttctactgagcctgcaaaagaactcctgaactcttcctcagctatccatcaaaatagattattattcaatgaggggagtgcaggtattactctgaagagttgcaaagggagccatttgatcctaacaatagaggtttattacacacacttgtattttgtggttaaaatcccatcatactttgatttgctaaacctcctcagtgtttggcttccaacttgttttctcctacatccttggaatcaccccacaatcactattgtgaatagttctaccacacctaaaattgtctttattctccggtaataccttccttccaactctcttcccaagctcccttgcaactccccactgcaaagcaaccagtgatctgtttactgtctctgtacattggttggcatttcctaaaatgttacataaatggaattacatggtatgcatttttttaatttccccttttgccttattagctctaattctttgttttgctattttagtgtttgctttcaggtttatggtaatatatctttactttcaaatcattttatactacttcacatatagtacatgaatcttattataatatacttcattttttcccctcccaagctttatgctattatttatcataccttttacttatataaatgttataaaccccatatacatactattttgttgtgtttagaccatcaatatcttgagggatatttagagaacaagtattttatatttgcccatgcagttactatttatagttttcttctccctgtggggagattcatatttccatctggttttatatttcttctgtctgtaggactttaacgtttttatagtgcagatcatctgttgatgaattggtgttactgttttccaccataactaggacccctgcatttttcctttttataagaggattagggggcaaacccctttgaacttctctgatgtgagtttcagatccagtttggctggtcttggatgtctggttccccacttatatgccagtctatatatgtattcatggttttcagaatttatttacctactttaattttcttgacttttcatgtgaattttaaagtctgctggttgctgtttacaaaatggtttacttgaattttgactgggattatattgattttcttgaacaaatatgagagtactaacatcttaatattgagtcttccagttcatgagcagagtatagctcttcacttatttaggttttcttttatgtttttcatcagtgttttgtaggtttttatgaatggatcttatctatatttagatttattcctaagtagttcagttttgggtgctattgtaaatagcattattttattattttagtttcagattccaaatgctaatgctggtatatagtagtaatacatttgactttggttggttagtcttataacctctaagactgtgtaaaattcacacattagttccaggaatattttgtagagtctttgaaattctctatatagataatcatattattcatgaataaggatagattcatttcttcccttccaatgtatgccttttatttttccttgcctcactgcactagctagaacttccaggttggtattgaataggaatggtgagagaagccattcttgccttgttgtagagcttaagagaagtcaattagtctttcgccactaagtattatgtgagctgtagatattttcatacatctctcttattagaatacaataatttattttgaaagcattgttattgttaatatatgtgaatgtttcataaacaatgtgtgttagattttactgtaggctttttctccatatactaatgtatcaattttaatatggtaaattgcaatgaatgaatggtgaatgatgaagtcgccttgtattcctggggtaaactccactaattgtgatttgttatgcttttcatatattactaaattttatttgtcaatatttgttatgaatgtttgtgtctatattcatgagcaataaatgtttatagcagtttttccttgtaatgctccgatctgcttttggaattaggataatgctggcctcataagatgatttcaaaagtatatcctcttctttcactttctggaagaagatgtgtagattagtagtatttctttcttaaatgataggtagaatttgtcggtaaaactacgtggacctggagatttttgtttgtttgttttcttttgtgtatttttcttttggataaatttgaaactacaattccaccaaagacaatatacaaatgaacagcatatatatgaaaaggcgcactgcctcactaattgtctcaataatacaaatcaaaatcacaatgaaaagcttctgggaagttcaaactgggcggagcccaccacaacttggcaaaggcgttgtagccagactgcctctctagattccttctctctgggcactgcatctctgaaagaaaggcagcagccccagtcaggggcttttagataaaactcccatctccctgggacagagcacctgggggaaggggcggctgtgggcgcagcttcagtagacttaaacattcctgcctgccagctctgaagagaggggcagatctctcagcacagcacttgagctctgctaagggacagactgcctcctcaagtgggtccctgacccctatgcttcctgaccgggagacacctcccagcaggggtcaacagacacctcatacaggaggctctgtctggcatctggtgggtgcccctctgggacgaagcttccagaggaaggaacaggcagcaatgtttgctgttctgcagcctctgccggtgatactcaggaaaacagggtctggagtggacctccagcaaactccagcagacgtgcagcagagggacctgactgttagaaggaaacctaacaaacgtaaaggaacagcatcaacaaaaaggatgtccacacagaaaccccatctgaaggtcaccaacatcaaagaccaaaagtagataaatccatgaagatgaggtaaaatcagcacaaaaatgctgaaaattccaaaaaccagaatgcctcttctcctccaaaggatcacaactccctgccagcaagtgaacaaaactggatggagaatgagtttgacgaattgacagaagtaggcttcagaaggtgggtaataacaaactcctccaagctaaaggagaatgttctaacccaacgcaaagaagctaagaaccttaaaaaaaggttcgaggaattgctaactagaacaaccagtttagagaagaacataaatgacctgatggagctgaaaacacagaacttcatgaagcatacacaagagacacatgagaacttcatgaagcatacacaagcttcaacagccaaatcaatcaagtggaagaaaggatatcagagattgaatatcaacttaatgaaataaagcatgaaaacaagattagacaaaaaagaatgaaaattaatgaacaaagcctccaagaaatgtgggactatgtgaaaagaccaaacctacatttgattggtatacttgaaagtgacagggagaatggaaccaagcagtaaaacactattcaggatattatccagaatgtcccaaacctagcaagacgggccaacgttcaaattcaggaaacacagagagcaccacaaagatactcctcaagaagagcaacctgaagacacataatcatcagattcatcaaggttgaaatgaagggaaatatgttaagggcagccagagagaaaggtggggttacccacaaagggaagcccatcagaggaacagtggctctctctgtagaaaccctacaagtcagaagagagtgggggccaatattcaacattcttaaagaaaagaattttcaactcagaatttcatatccagccatactaagcttcataagcgaaggagaaataaaatcctttactgacaagcaaatgctgagagattttgtcaccaccaggcttgccttacaagagctcctgaaggaagcactaatatggaaaggaaaaaccagtaccagccactgcaaaaacatacccaattgtaaagacccttgacactataaagaaactgcctcaactaacaggcaaaataaccagctagcatcataatgacaggatcaaactcacccataacaaaattaaccttaaaagtaaacgggctaaatgccccaattaaaagacacagactgccaaattgtataaagagtcaagacccatcggtgtgctgtattcaggagacccatctcacatgcaaagacacacataggatcaaaataaagggatggaggaatatttaccaagcaaatggaaagcaaaaacaacaacaacaacaacaaaacaaaacaaaaaaaagcagtaggggttgcaatcttagtctctgataaaacagactttaaaccaacaaagatcaaaaaaaggcaaagaaggacattacataatggtaaatggatcaatgcaacaagaagagctaactatcctaaatacatacgcacccaatacaggagcacccagattcataaatcaagttcttagagacctacaaacaggcttagactcctacacagtaatagtgagagactttaacaccccactgtcaatattagacagatcaatgagaaaattaacaaggatattcaggacttgaactcagctctggaccaagaagaccttatagacagctacagaactctccacccaaatcaacagaatatacattcttctcagcactacatcacacttattctaaaattgactacataattggaagtaaaacactcctcagcaaatgcaaaagaatggaaatcataagaaacagtctctcagcccacagtgcaatcaaattagaactcaggattaataaactcactcaaaaccgcaaaactacatggacatggaataacctgctcttgaatgactactgggtaaataatgaaattaaggcagaaataaagaagttctttgaaaccagtgagaacaaagacacaacatgccagaatctctgggacacatttaaagcagtgtttagagggaaatttatagcactaaatgctcacaagagaaagcaggaaagatctaaatcaacaccctaacactgcaattaaaagaactagagaagcaagagcaaacaaattcaaaaactagcagaagacaagaaataactaagatcagagcagaactgaaggagatagagacatgaaaagtccttcaaaaatcccatgattccaggatctggttttttgaaaagattaacaaaatagatcgaccactagccaggctgataaagaagaaaaaagaggaatcaaatagatacaataaaaatgacaaagggactatcaccactgatcctatagaaatacaaactaccatcagagaatactataaacatctctacacaaataaactagaaaatctagaagaaatggataaacccgggaggcagaagttgcggtgagctgagatcacaccactgcactccagcctgagtgacagagtgagactctgtctcaagacaaattaaaaaatgatgtagaaaaggcttttgataaaatttatcatcccttcatgttaaaaattatcagtaaactaggtatcgatgggtcataaataaaaataataatagcagtgtatgacaaacccacagccaacatcacactgaatagacaaaagctggaagcattcctcttgaaaaccagcacaagacaaggattccttctcttaccactcctattcaacattgtattagaagttgtggtcagggcaatcaggcaagagaaagaaatgaagggcatacaaataggaagaaagaaagtcaaattatccctgattgaagaaagacatgattctatatctagaaaagcccatagtctccacccaaaagattctttagctgataaacaacgtcagcaaagtttcaaagttttcaggatacaaaatcaatatacaaaaatcactagcatttctgtacaccaccaacagctaagccaagttccaaatcaggagcacaatccctttcacaattgccgcaaaaagaataaaatacctaggaataccactaaccagggaggtgaaagattcctacaagtgagtagaagtcagagaggcaatagagcacacatcctgcaggtccacatggactagtgtacaggctttaggctgtactccaaatgaaagaggaagccattgcaggattctgagccaaggagtggctattcttctgctgtgtcccttcaccatcaacctgtccaaaactaaaataattaatttaacttactctcttaagtttattcgggctgctttcatagaacaccataaacttggtggcttataagcaatgtaaattcattttccatagttctggacagtgataagtccaaggttaaggtgctgacatatttggtgtctggtgagagccaactttcttgatcatagacagtgccttctcactgtatcctcacatcactgtatcctcacatggtggagggtgagggatctctcttgggtctcttttataaggacactaatccgattcctaagggagattctctcattacctaatcacctcccaaatgccccagttcctaataccatcactttaggggttaggattcaacatataaatgatgggcggagtgagctgcaaatattcaatccataacaattacttagtcctccagttgagccctactaccctatgttaattcgttaaaaccattcactatgtctttcaaaccagaaataaaatagtttatttcttgatcatataatagtccaaggcaggggtttcttatcagtgactctattccatacaatgattcaatgacgaaggttatttgcacctgatggttctgccactttttagggcctcattttccacagtcattgtacagccagcgaaaagagaaagaacgtatacaggaggttctttcctccaaagctggcacacatcacttttgtcatattctgttagcgagaactcagggatatagctccacttaagcataaacgatgctggaacagggagtttagctaggagctcagagagaaaagacttggatgaacagctaagtattctttaccttatcaaataataattaaattaattgattctgccaactaaatacctcctgaaaatatgttacttttcctccatcaaaactctgctgatttattcaggtcttatcctctttacctgagtttatggaaaaatctcttaactattgtcgaaggtttcagacttttcctcttctaatttatcattatagtgacgtgaatatagatgtcctatttctaacatgcaaatttggacattttcgcacttttccatgaactctccatgatttcttacattggtacttaaggcttttcctgatcagctttaaagacttgtctgatgtcagattctgctttccccaccgaggctgtgggtttccacaatgccacgtcatctgctgtttgacaaattgtctgtgtcctgtcacatgctccagaggcctaagtcatacgattgccatttgctcatggcaaatgccaactctgcaagcaaccaatccatcctttgcaagatgatctctaacttaccagaagaccccaggagatgagtcgcatgcctgatgccccacatccacttaattatgacctaggacacagtaagtggctcctgacttccagtcagcattaggtgtgtcagcaaatgatatattttattttttcccacaagattgattgaatataacaatgtctcatttgcttccttctttctctctgtcttgcttgcttgctttcatctttctctcattttctttctttctttctgctttccttcccttttaatttagacgatgtgtttgtttggacctaaatatctcatattttcaaagtgtgggtgggataaaatgacatcgaagttttcttctagcctcagaaatgatagattctttaggtcatgaacatgaggactcatctttcatagcacctggcttgtggtgcctggattgagtttgtgagggtgctgtttcctgcagacccgtgcatattcttcagaaaccactatctacacacatcacatttgttggacacaaactatctgatcaatattaccgaggggtaaggaatttagatgctatttaaacagcatgactttttaaggtcagaaaaagatgtctactcctatctcattctcaaacatctgaaaaatatttggaaattaagcaggtggggaacatgtgagttttcttgatgatggaatttccttctccttttggttccaaccaccagcagcatttttgcaattaatttaatattagatgaacatgaaggaacacacttctcatctctgcagaagacaagataattggggacacattattcttttattctaatttgataatatctttcatgtcttgtatcaatatttttcttgcaatatactgaaggcagggcataagtatatacatgtgcacgtttgttatctaaacctgatgcttccccagagtagttcaaagtatatcagtgttttgaacttaatgattatcccatggagttacagctattaattgtctctaaaattatttttaaattatgtaaaataaaaagacatattacaacaacattgtgtgagaaccaagaaatttaattgtatccacgcaatgactagcatttattagtcactcaataaaaatgtgttgggccaaatacgttcttcccttttattttttttatgtggagccagataaaataaagcccattaaaacaagaagagaaattaacaaacaaacaataaataaaaattctccagataaatttgagcaattttcttttctcgtagttgttgtaatcagagttgtccgaaattttaattcttaatttttctctatcaaagggagtctcaagagaaaaaaataaactttgttataaaattatgcatgatctatattgaatttccatgagtgagcgctttgacttcacagcatggggtaaactgccacaaatgtatggcttagtttcattatgttgatgtcatgcaaacattaatttataaggcacaatatttatactctttatatattaactccttcaaatttgcttctggagaaagatttgcatcatgagattcttttcagattttaagtgtcattaatatgttaatgaatctttacctgtatatcaaactgtgtatttaggatctccacttgaatgttttgcaggtacataaaaggtaaagataaaactcgatttcttggtttattacttcatcattcatctatgacaaaatggcttcataagttaaggagtttcttacaaacaaaaaaccaaagaacaaagaacaaaaccagaaagcaaaaaaataaacaaataaaaatttcaagtttccttggccaccaccctctctcactcttggattcaatgcacgttctgttaatttcatctacagatttatcttggaggcacccactgttttatatcaccacctctatgaccctggaccaagctaccatttttaattttctagactgctgtaaaatcccctaacaaaattctctttccactgttgtcatctccaatatattctttagagagaacatccaaagtaatcgttttaaaacctaaaaataatgctgcccattgtttaaaaatctgcaatgattcctcactacaattatagtaacatccaaatttcccaccatggcaattcctgcctgctctggcctcggcttacttctctctaaagccaccacagcttggcctactttcctgtcctcacaaagctgagctctttcccactttgtttagactgctgtctctgtttggagcacccttcctctgactgctcagtgctatcaccttctcaaactccagctcattactttaacggcaactctttgaaaagagcttcttgaattaacccaacatattaatactcataaacagctagtcttttttcacctttatgttttttattctaatactacatagcactgtccacatattacaatttccgtggaagctttataatttcatataattggaaccagtggttaattagataaatacgctctccacaaaacaacaacaacagtttaaaagtagaattaataaaaatgtacatgcttaaattaacattttattttaacttaaaacatgcagatgtgctttccttttctaatcttttgccatagggtcaagggatttttttaatgtatattgttgaataactgaagttattctagatctttcttgtaatagtataacccatattgttttggccgtgaattcaagtttcagttacttaatttatgtcaaatgagaaaccaaagacacctgtaaagctataagaatgtccattctttttagatttcaattgattccttttattatttgcagatgcaatagcacacttaattcgagtgtttttaaaaaatactttgctttgttttccatgaatcatttttatgtttttcaaaggttttactcttttctctctggtagtaatcacaccaggacccctttcatcttgtactttgttctcctccagtggcaaggttttgtggtccagacctagaaaggctgtgaacaacactgacattctattggctagtccccagtcacatgatcacacttaattactaagaaagccataacatatgtaactctgtgctcaggaaaaagaaaaaaatgggtttgattagcaactagacagtcttggtaagactctgtttttaagtttgatattatgatacaactgggaacagatgactaacttttataagtagtatttgttctagaatgttccatgctctactctgtctacttgacttgtccaaacctcctggtagggattgctttcaaaagcaaactaatagaaaatattacatatacacttatggggtattttttattgatatgttatagttgtacatattttggaagtacatgtgatattttgatagatgtatacaatctgtatggatcaattcaaggtaagtgatagatattatatcctattaatgatattcccttttagaaattagacttatgaagataggatcagaaagaaccctcttgaaaacaaaacaaatattttatgtggatcataatattagtttacattattagtaaaataatgttacagacactaaaatactaaaatagtctttactatttactaacctaccagcctgttcccttggctatcatttacctatgaggtgtctgcaaaacattgatgagatttaatgaaatggatggtatttgtgactacatgaagatagttttgttggctggaaatagcttccacacagatgattaagcctgtgtagaaccatttgaaggcattgaaaagaaacctcaccaaatatatttcattactcattaatcagtcacaattcctaagatccattattaaacagagtttgctagattaatcactatgctaacatcttaactggaaagaggattaaattaaaccataatttgcattgttattgcatcatgaatgaatgtataaattacttgactctatgtaaataactaaaggcatacaggagggaacagttgagattttaatggcaaaggttggagagaatagaaaactgtggatataggtaatgaatgagctggcagattggtggtagtcctgaaggcattagggtagtagaaagctaatgctaacttataaatatagattcatccctggacacagttgtgttcttcttgctaaggttctgcttgctgcaagtgtttccctatagtttctgctctaaagagcaattatagccatcccttatagtatgcaatagctacttccatacaatattcaatgatatcctctcctggctttagtgacatatcaaacattagaccaatcacatgtcaatcagaaatcaagatagattttttatatgttccacaggtggcagagctgcaatgaagagggtggagaacctgatatcagagtacctgagtgcaaatcttagatgtgttacttactagcaatataaacttggtaaggtgactacattctttgagcctcgtttaataagaaactctcttattatttagttggaagtaaaaattaatttaacaatttcctaaactaggaaaaaatttatcactttcttataaattgaaaatgcccatgctctattataaaccaacaatttcacagaatagagaaacctttgcttgtctgcatcaggagacatgcatgtgtagcttgaaggtagaagcaaaaaggtgaaaacaaatatttatcataggggaatggataaaaatattgtttgaatatgtgtaattaaatttaagaacatgttattaaaaatgtatacattatgagtatgatgtatgatttatacagatgacacaatccatataaatattggacaattcaaaaataacatattgattatagctaaatgtgtaataagagacatttaaaataaaggaaaaacatttatacaaaagaaatatgtttggaggtttctattaaacatgtacctgtctcataacccagcaattttatttcatttctacacaagataaataaatatttatgtttctggaaagacatggctaagagtgctcatattggtcttatatataatagccagacactaaaagtaatacaaatgtttatcaaaagaaaaatggccaagctcactgtggtatatttatataatgaaatgctacacagaagtaaagataattgactatcagtagacaaaaacatgcttaaatgttaaaagattatattgagcaaaataagtgaggcacaaaggagtatatacaatgcttattcaaaatccatgaaaaaacaaaattattgtatgatgatagaagtcagcacagtagttaccttgtggttcgagtgagtattgattgaaaaggtacacaagaaaattttctggagcaatgaaaacacaatcttatctagaaaatagttatatggttgtatacatttgccaaagataggactgtatgcttaagatttgagcattttaatgttcatagattatactgaatgtttgtagaataaaaagattgtataacttctgtaacaaataattttaccatgaaaatgcacaaaaaaactacccaataaaaaattgtaaaatctgaatttaacctgaatgtttctctttatggcacttatttctaatagatctccactgcatggagaatgaaagaagaaaacatgaacagtatttttatttccttttaattctatgagtgcaacaaaaatttaaattgaaatagcaaagacatgaaaaataaaagtaataacgttgaggaattaagagagaccagtgaatttgaagtaggtcctcctatgaatacttacccatggtaaatgtgtatttagcaccttgcacgtgattctggaaaacatgtacacatctgtcttcctgctattagacatgagtttaagaattttgacctagatatttaaatcaatacacttaaattcaaaagattaatagtaaaagctaagagttcacattacccccttggctctctcttctgctaaactaaagtagaaggtttgacttagctttcagagagaatttttaaagtcttagatgtaatagacttaaatgggtctcttagcattactttgtcaagttcaggaaagtcagccaagttaagctctgaggtatgtctgggactgacgtagttttccctcagatacttgtaagggttttacacataaattaatgaattaatcatgacaatgttacaacacagacttctaatagctctctagttgcatagtttcagaattattcctttaaagtttttagaaacaaaaattatggcaaaaaaattgtaaaggattagtaaagaatcctgttacctggtcctatttaatagtactgcttaaataaaaagcagaaataaaaacaatacaaaaactctaaatcaatgtttatagaaaaatatgtaacctaataaatggtaggttacttaataaattagaagaagatgtatagtcatccaaaagttgcctattaatgaacagatgtctggaactgacatctggaaggagattttcaaggtcacatattgggatcagaacttgatcctcttttattgacctattaatataatttgggtagtgaaatatcaatcccatcaatgtataggtcaatgctgggattcaaataacttaaagagtgctgcataacaagtcgttgttttattacctatccattggtgaataataaacctgctacaacaattttatttgctcatgatactgttggtcggcatttggactgggctgaactgggtgtttttttttttcttctgaccttccctggtgccactgatacagctgctgtccgctggagagttgtctggtgcctagtagggctaaggtgcctcagctgaacagcatgtccttggtcctcctgatcttacctccagttagctggcttgggcatgcttacatggcaacagtatgtccaaatcggacaagagcaagtagcaaggcctcttggggcctgcacttggaagccatacaacctgtgttccacaatattctgttgttcaaacaagtcaaaaggctagcccagatccaaagggtaaaaaaataaattccacctatcaaagagagaagctaaaaataatgtgtggccattttaaatgtagcacagtcttctccttggctacaattatttatattcttcttatatgcaaaacacaccatttcctaagatccctgaaaacagtggtatataacaaagagttttcgagaaaaaaaaaaaaagagcccggatttggagcatttgctcatttttgtggtatacatactaccaccatgcctaatttcaagctactgacatggcatcactgagtgccagttgggaaaaggtgactacgatcagctcttaaaaggagttatgagctggaacccacataacactgcccacaaatcccattcaatcatagcattagacccgagtagaacatataaaacatggcatctagttcagatgttgtattagttcattctcacattactagaaagaactacctgagactgggtaatttataaagaaaaggggtttaattgactcacagttccacaggctataaaggaagcatggctaggaggcctcaggaaacttaaaattatggcagaagatgaaggggaagcaagcacatcttaccatggtggagcaggagagagagagagcgcctgtgacaaggaaattgccacacacttttaaaccatcagagctcatgagaactcactatcatgagaacagcaaggaggaaattcacccccatgatccaatcacctcccaccatatccctcccccaacattgggtattacaattcaacatgagatttgggtggggacacagccaaaccatatcagacgtagatggggcttcttgactatggcttcccttgatttgtagacctataaaaatatgcattatctgctgccttattcccaatacacgatactgagatgatggcatagtaactactataggcagtgccattcaaaaagagaaggaacaaaaattccatggtagacagtggagcacaacaatatagaaagagcacacagtatcaggtttttatattctagaggctgaaaatattctgtgattaaggctctgttttgctccttgggagtaactctctagttcattgttgtctttagatactggtttgcactttgggctttgactctgcctgctagaatgtttgctctgcactctgtaatgtctttcctattccaaaagatatgttctgtactttctactgagacactttctcatcctgtttcctgcttggtgaaaattggggacccaggggcccgttttaattttgtactgtctgtccacttgtatgtcaaggtgctacaacttcctataaattactttggcttccctatgtatcggaatatagtctactccattcaacaaaaatcatacccatgattctttatgtggcttctttcttagactttttcagagccactttggaattagggatccatgtaacgatgctcttaatttcttaaatgcctttttgtctatctgaaagggtttactagatactgacttaagtctttcagagagtttagcaaaggctcttacagccacaattttgttttcatgtttgccctgaggtgatatctttatttaaaacatctttgtctattggaaataccagagattagatactgttttgttttgtaaactgtcaagtcctgggcccccattatttcttctaaattattctggcaaaataaacatctcctatttgagttcatctatcttttctcaaccattgttaaacgcagtttacaaagatgtttgtatgtatgtcttctcagccatatttactagttattagtacagtacaataagtaccacataggcatatgaagaagaatggcaaaagtaaccactgtagtggccgattagtgtagaagaagagtcaactaagctgagttttaagaatgagtaagatttggtcagggtaagcctaaggagcacatggaattcttatctagttcaaaatgttttctgtatggattgctagaagatacagttagctgggactccattatgttagaatttgtaccatatcctaaaagcaataaggggagggtggttagaatgtttagaacaagggaaagacatatcagacctacagttataaagttcaccctggaattagtgtggagaatgaaacactagaagagtcaagagactgccccagccattcagacatgaaaggagggtgtggcctgaacagggtcaatggcactggtaccagggcaacaaagctaccctttaaaactacttagggcgcacaatgtcagaatttagtgttgacatagaatgttggagcaaacaagaataacttcaaggtttcaggtttgggcaaataacaaggagatgatgcacttaccacgaagggacatcagagcaggtttgacatgaaatattgtaagttcagcttgagatgggttacatgagaggaactgataacacttctgagtgggaatgtcctctctcccttgttccctttctcatgatgaggccagccagctccccttcacttccaccttgagtgaaaatagtctgaggccctcaccagatgcagatgctggtaccatgctatacagcctgcagaactgtgagccaaataaacctcttttctttatacattacccagtctcaggtattcctttatagcaacataaataaactaagacatctgcctttgaaattcagaagaaaaatgtttcatggatttagatagaatagggaagtgcctatgagtcgtaactacaataggatttgaggggaaaaccccacatgatttaattttcagatgtatgcctctgacaatcctgaggattgagacaaacaccactagtcataagatgtagtcatcagtggagctttactggggaaatttgtagggcaaagaatcagcagaacacaagtcaagctcagtgtctcgcatgttataggaaggcacactaagatgggcaggtttgagtacattgtggattatgatcgggagagagacctcatgcctctgctaccatttaaaatatttacagtgaggttcgttgcttttcagtcaggtaaattgaccttggaatttgaacttcagacccttaatggagtttgcatacagaagccaagtgtgtgtagaaatcccagtttcattgctgctgagccagctcattgccaagatacagaagggaactggggaaggaagtctatctgagttgtccagcagacaaagacttaattctccttaacaaatggttcacttcctctgtctttccaactggacaccaattcccttggcccactaaagtaaatctaggaagcattcattttgatccaaaacggccttggtagactaggattttcaaagtctaacaagaatttggctgggtttggaaggcatattttttctctttgttattcttatgaattactatgagcctgtcttttttcctcacttgggaaaaaatatgggcatgtgtgagtatgcatgtgtataaaataaaaacaaacatatgtgtcttggcctccctgttgtttcttagatctaaacaaatattagtgagtcatttaatgtctatattctcttcagatacaattttagtgacttggggtaaatatattatttagaagtgtacacctcagaaatgccagctcctatctgggatgtgtggatgaatatcaatactctatttgcatagctaatgattaagattgcagactgaggaaggaaaaggaattgctattagaaaccccaaatcacacttgtggggagtggcaaaatcaaattagaatctaggtgatctgactgtagtacctgtgttgtccagcacttttaactactacttctaaatacttggacagaaggcatttgagccagtgtgtgtgtgtgtgtgtatgtgtgtgtgtgtgtgtacttgctaattatatgtataacacatgctctgttatgaactatgaaattccaaccccttggtcatattacagaatgggctctagtgtattctagattctcaactaaggctgtggaaagtgttgatgttagaagtgtacctacaccacttctgtggataggtactcaatatactcaggtttaagggtctttggtggtggaaaggtgagaatatttattgttgaattatttgattaaataaattttaataatttttttaaattcatgaatattttttcctgataaatattttttaaaattactttcaatctattttttcttttttgaaatgaaataaaatattttcttatttgtaagagagaatggtaatggaattgttaaactgatattttcttatttacctaatgaatgtagtactttgcagtaggcagtgaagaaaaagctccttttgaatttttaaggcttggagcaaatttattaaacacattcttggtgtcagtgttaattttttgttttaaagattctcttcaattaggtttcaaatgtcaattcattttgaaaaatacaacaaaatctgtatgaatttatgttataacaaagaacatgctcaacaataaatctacaggtgctaatgtttaaaatacatgatcttagtctgcaaatcattatgaaacagaaattgtacatttaattcacctgggctgagtacgtaaaccttcatggaagtatacctatacccttggtaagctttcactgtataaaatacaggaggtgatggacacagagtagcaagagtttaagaggtaattttcttatccaaactaaaggtgttaacagcagcctgtaaggctaacaaaaatattgtttatcataggctttgatgttgaatactgctggcttaagctgaactgtttgtaggctttttctatcagaatgcctactctaaaggtattgatactatttctgtcaatcacattgtttctccaaacagtgaagaggaaagagttaaacataggtttggcacattcatgggaattagacatttaccccagtaggagttgattttgcagttctgaccccggtgcatgtgtaattatgtagtttctatgtgaagataagtttttgctaacttttctttatgcatttagccactctctactctactcacacattaacgtattacataaacattactcttctctttcttgtaatgtctatgtccctttacctaatgcacgaaccattcaagtaatgccttttggtgtatgtattgctataaaaattatccatttttgcatcagacagatctcaattggaatcctaaccttctatcttactaactgtgaaaaatgaagtatttaatttactaaacttattagacacactacgttttctcacactggagaaataattatcacatttttgtgtgtgtatagtcattaccagttttgatgcttataataacaatcaaagacaagtcttcagcaatcctatgaagcagataggtttattgtctcatttcacaggtaatgaaaggagtcttggtaattaattagctgatctagattccaagcaggtctatggatctcataggctgtgtaaaagaacggatactatgatataaataattgatccttgatacaggattgtgcttacaaaatttaaagatttcaaaactaaaatatttctaaaataccaaaatgaacagtaatcaatgtaacaattactcatctattcaccaacaagaatggtcatacactgatatttgacatattttattcagatcttattctttttcattttaagaaaataaaccaatgtagatagagatgaagtcttactttggccctcctctccccttctttcatttcccagaggtacagccagggaggttgggttttgattctagtcatacactctggtgaggggctgcatctgctccaagaagctggtttaccttttaacattttgttcaaaggatttttattggctaacagaaaccctgataagtttttctccccagccccaccacctccccttcctctaatcctgagaaaactacagttccctacctactttttcactctatatatgtatctatagcaagagcattattgttttatatccttaacattttccatgaattgtatatttgtatttaagtataaataaacatacttaaagtatacttccagtatttattattgataagacaagttatactatgatattattttccaacttgcattttcataaaacattatgatttcaagattcatccaaactgatacctatagatcaaatttcatcatttaatgctattatgatattatataaaatatgtacaattttgttattcatttccctatcaatacacacttaggttgttggtaattttcaattttactatgaatattggcactaggataaaaatttagtagttcccaccagttttcccaactttgctgacctcaagtcctacagtattaattgatttccactcttgttaattgctgagagtctcaccatcttttacccataatcaaagttttattcagaatcccatctgagtgtcttttgctccctactggacttgacaaatacctgattaattcagattctgacactgaaactcacatggggtgagacaagctctggatggggagaagtggagttggcacagctggtagttaagtgtgtgcagtcaagtggattcgagatgatgtcagagagaggaaatctttaaaattttttttttgactgcttatccgtattcctgtgttataatgggaagaaaaatggtctttgtctccagtttctataatagagttcccaaaagtctctcctgagtgctaagaatgtctttgttattcattgcatgtcttttctcatcacacctaagtttatgctaaggaggtaactcaaggcagggaagaggaccctaggtggcttcagaatggaggctggtcaccagaaaggccaccctccaatctctgaagaggggagtggggctggagattgagttgaatcaccaatggccaatgatttaatcaattattcctaagtaatggaaccgtgataaaaactttaaacaatgagatttaggagcttccaggttggaaaacacatagatgtgctgaccaggtggtgcatggggagagcatggaaactcacccacccctacacctcacctatgcatcctttccatttggcttttcttaggctatatccttcataataaaactgtaattgtaagagtgatactttcctgagttctgtgcattgttctagagtattataaaacccaagggggttgtgaaaaccccataatttatagtaggcagaagcacaagtagtctaaagttcccatttgtgactggcacctgaagtgtgtgcagtctagtgggactgagcccttaaattgtgggatctattttatctctggatggttagcgtcagaattgaattgaattgttggatactcagttggtgttaaagagttgaagaattggtttctccttgtaaaaccaaacacacccttagtagagcaagcataagtttaatggataagtacaatgtctgatccattcaccattgaatacttagcactagataatgatatatgtacaataaacctcttattttataaaccatgttggtctgaggacaatttagagaaatcagctagcatatttaagggactagaaagacatataacctacagtgctattgtagtattgtagtccatgaaacatgaaacgtgaaatattattggggaaaaaaagttttgctcaatagattcttcaatactctactaatccagataataatagaaaaataggaagttacaaggttattacctatctttaagaaaacattgtgaaaatttgtatttactctcaattttagaggtttaaatgagaatcgtaaatgatgaatatttaacctggaaaaggagaataaggcagaataaaaaggatggaagaaagaaggtgaccttaaactttagtgcccaaaaaatactggatgggccactatgattccagtactacaatttttcacttgcattgacattcacggaatatccaacaattcaatgcaattctgacgctaaccatccagagataacataaaccccacacccacaagttaagggctcaggcccaccagactgcacacacatcgggtgtcagtcacaaaggggatgcacaaggacagagaaatgctaaaataatataagagctgttatttatttaacagtatatgcttttatatttggtttgctggctaacccttcactttatgctttattttggcccatttgtaaactggaggtaagaatagctctcttttcctggaaataccataaactcaacaaaacataaacagtaacgtttccaataatttttctttaaaacgatcactactataattcattgagttaaaatgacttaaaattaaatcttataaataataactattaaaaatttacttacccaaaatactgtcttctataacattttatgtacctaaacacctgtcctaatttattttttcccttttattgctaatcttttaataatcacaaaacctgaatccacttctaccatcttctcttcccttacaacaagctgattgttggaaggtataaattttgttgcttccatgtctccaaattgaatggcctccccctcttccccactactggtacattattcaaggccttgttgcctctcactcaactaatacaaaactttcctacctgttccccttatcacaagtctcttcctgttctgtataaactgaataattctgttccccgaaaagtcacaggttgatatcctaaaccccacatgtgatattaggaggcgaggtctttaagaggtgactagctcataagggtggagctcgcatgaatagaattagtgacattataaaagacagcccatatgagctggggcccactcaacctgctgctatcaccatagctggcacccacccacatgcaccaactgtgagtttgggaactgacctccccaacccagtgcagccaccactaataccagtgcagacctctctgatcccagagggttgtcctaccactgctactgtcattgcccatgctacatccactgtcaagggcttgagaacctgccactccactcaacccactggtgccattcttggcactaaagtaagccaccaggaggcccgagaattagcctacctggattcagtaataccagtgccaacatacactgccctggggctcaaggacaggcacacttagcccagtaaaactgaatcagcaataaaagtctcccaatagagaaaagtccaggactggatggcttcattgctgaattctaccaaactttcaaagaagaaataataccacttcttcccaaactattccagaaaagtgaagaggaaggaattctccctgattcattctatgaggccagaattacctgggtacaaaaaccagacaaggatgaaacaaaaacaaacaaaaaaactaccagccaatatccctgatgaagacagatgcaaaaattcccaacaacttgctggcaaacaaaatccaaaagcatattacaaaaataatacaccatggtcaagtggaatttatcccaaggatgcaaggattgatacatgaatcagtaaatgtgatatatcacagcaacagaatgaagaacaaaacctcaatagctgaagaaaaagcatttgataaaattcaatatcctttcatgataaatactgtcaacaagctaggcaaagaaggaacatacctcaacataataaagaccatatataacaaacccacagctaacatcatactgaacagggaaaagctgaaagtctttcctctaagaactggaacaagaaaaggatgcccacttattattattattattattattattattattactattatactttaagttttagggtatatgtgcacaacgtgcagatttgttacatatgtatacatgtgccatgctgctgtgatgcacccattaactcgtcatttagcattaggtatatctcctaatgctatccctcccccctcccccaaccccacaacagtccccagtgtgtgatgttccccttcctgtgtccatgtccatctcacaccagttaaaatgacgatcattaaaaagtcaggaaacaacaggtgctggagaggatgtggagaaataggaacagttttacactgttggtgagactgtaaactagttcaaccattgtggaagtcggtggggcgattcctcagggatctagaactagaaataccatttgacccagccatcccattactgggtatatacccaaaggattataaatcatgctgctataaagacacatgcacacgtatgtttattgcagcactattcacaatagcaaagacttggaaccaacccaaatgtccaacaatgatagactggattaagaaaatgtggcacatatacaccatggaatactatgcagccataaaaaatgagttcatgtcctttgtagggacacggatgaagctggaaatcatcattctcagcaaactatcgcaaggacaaatgagaacaggatgcccacttttatcactcgtattcaaaatagttctgggcatccaagccagaacaatcaggcaagagaacgacatgaaagacatccaaattgaaaaagaggaagtaaaatgttccttctttgctgttgatataatcttctatctaaaaaaatgtagagtccaccaaaagtcttttagatgtcataaattaatcaaaccaggatacaatatcaaatataaaaatcaggggctttatgtatgtcaataatgaactagctaaaaaagaaatcaagagggtaatctcatttgtaataggtaagaaatacctaggaatatatttaacaaaggaagtgaaagatctctacaaggaaaactgtaaagcatgggtgaaagaaattgaagaggacacatacaaatggaaaggcattccatgcacaaggatcagaagaaacctaatgttgttaaaatgactatgctgcccaaagcagtctgcaaattcaaggtaattcctatcaaaacaccaatgtcatttttaacagaaatagatttaaaaaaatttgtatggaacccaaaaggagactgaatagccaaagagatcctaagcaaaaagaacaaagctggaggcatcatactacctaactacaaaatatattacaaggttgtagtaagcagaacatcatgatagtggtattaaaaacagacaaaaaccaatggaacaaaattgagaatccagaaataaatctgcctgtttatagacaatgtatttttgacaaaaatgccaaaaacatacattggggaaaagatgctttcttcaataaatgatcctgggaaaattggatatttatatacagaagaatgaaattataaacctatctgtaactataaaaaattaactcacaatagattacagaattaaatgaaaaacccaaaactataaaactagtagaagaaaacatagtgaaaacacttcaggatgttggtctaggcaaaaaaaaaaaaaaaaaaaaaaaacttcaaaaaatagacaaatgggattgcattaaactgaaaagcttccacacagcaagagaaacagtcaacagagtgaagagacaacctgatgaatgggataaaatatttacaaactatttatctgacaaagggctaatatccagagtgtacaaggaactcaacaacaataacaacaacaaaatatacaaatagtcccattaaaatgtgggcaaaatacatgaatagacatttctcaaaataatacatacaaatggccgacattactaattatttgggaaatgcaaatcaaagctaaaatgaaataccttctttcccaaattagaatggccattataaaaaagaaaaaataataatagatgctggcaaggatgcagagaaaagggaaatcttatacactatttgtgggtatataaattagtacagccattatggacaacagtatgcagatttctcaaagaactaaaagtagaactaccatatgatccagtaatctcactactaggtatttattcaaaggaaaagatatgagtatatcaaaggcatacctgtactttcgtatttactgtagcactactcaacgatagcaaagatatggaattaacctaagtgttcatcaacaggtgaataggtaaaaataaagtatatatacatgatgcaatagtattgcccatgaaaaataataaaatcatgtcatgcacagcaacatgaatggaactagaactcattatgtcaagcaaaataagccagatgcagaaagacaattttttcatgatgtcactcatatgtgggagctaagaaagttgatctcatggaggtagaaatagaataatagataccagcatctgggatgagtgtgtgggtgggaggtggggataaaaagagattggtcaatgggtgaaaacatgtagtcaaataaaaggtatatattcaaatgttccttaacagagtagggtaaccatagttagtgacaatacatatttcaaaagagctaaaagagaagactttaaatggtctcaaaacacagaaatgataaatacttgaggtgatggacactccaaatactctaactttatcattacacattctgtgcatataaaataatatcaaatgtatcccatcaatgtttaaaatattatatatcaatttaaaaagtagaagagggagctccgggaaaagaacagcaaaaaacaaaatatagccactatttgtccatatgtttttgactgagccaataaagcaagtcattcagtaaaaagctgagtgatacttctgaatgttgcataattccctattgttttattttcagaggtgcttcagtataaggctaagaaaaaaaactctgtcatttatccttaagtaggaaagaaagaggagaaacatttcacaggttacctgagataaattacaaaaataaaaatttaaacttttttggtcgaattaatacaatgcatttgattagaaaaacatttattaaattggtatacatatctatgagtctttaaaaattgaaagaaaatattataagggatatatttggaataagaatgtatgctatgaaattctctacttcatgaaatgagtaactgaattggtgaactaatgagtattagacttaaggttatcaatcaccagtgatcaatcatcatctactccagttgcagaactgaaagtgaatacttgatttcttcctttttgaatacctttgggaaagaattttgtcaacagtgtgataacatagaaatgtgatgttctgcgcttctgattctcttgatcagtaagacactgtactaagaaagagaaaaagtgaaattttgaaacatgactaaaacctcagatatatacattaatattcaactgaactcagataacttgattctccacaatatttgaagacttcttagcaaaaaataaagttttggactttgggaaaaataaaaaaggagagctcccagaaagttatatttcccctttctgccatgtaggacacaacaacaaggcaccatctatgaaccagaaatgtggcccaaacaagttgccaaaacttccagtgccttgactttggacttcgcagctccagaactataagcaataaatgtttgtcatttaagctacccactgtatgatatttttgttatagtagctcaaatgaactaagatgctttctctaattatttgctgtgggaatatatcctgatatagacataatatattcctttcagaaatatgcaatgcaataactaccctgtattctattaattaattaatttataacaaattaatgatgaattgtcagactggcacttgttaatttttagcctaccttttaaaatttttttgtcatttttttttcttttaccaacatcctccccaggatttcccacttctagattttcaatattttcctatgtcttttattctctagttttctcctacctataacacctttctcttccactgtacaagccagtcaaaacttgattcatactccaagacctatattaaagattgtctcactcgtgaagtcattcattaacatccttggacctaatcagaggactcctccttccttgcactcacttaataaattgagaatcatttttctttgagagattgttacttgtgttctcaaaagtcagtattaggtccttattgagcctgtgggcctagagtcactgcctgggtttagaatctgccttggctgcttactgtgtggctctcttaacctctctgcactttcattttcttacctgtaaaatagaaataatgagagaaccttcatagagttgtggcaaggattaattgagctaatgcttacacagttttaaaactttgcctagcatgtagtaaatgtcagctgttgtttacttgtctcccttctgtcttcccaaatcatcaccattttgactctgtattatctacctatccatctatctatctatctatcatctatctatctatctatctatctatctatctatctatctatctctctatctatctatcatctatctatctatatctagttctatttctctggagaactattggttggttctatttctctagagaaccctaacaccctccctttctataatatacattctcagaagcagtttcttggttacttgttaatcatctttcagatctcagtgtgagttgagttcctttgttctaccctttaaatcaaagatcaagatttctgtctctttgaatactgatctcaacttcagtcaacatgcaactattaattagataacttattcaggaaatatttattgaattcttgcaccacacatggttccaagctttgaacacatagcagtggaacatcatcatactatacattggtgtaattacctgattaatatctattcactcctttatattataagtttataaaagcaaggaccttgttgtgttaccaatgtgtcactgaatcctaattcaatgcttcaagcgtggtaaacgttaatgaatgaataaggtttttgaaaagcaggaacattgtgttgaccttactcatagtatctttcacaggactgtgcgcatgcacacactaggatgttctacaattcaattagagttctgtacattttaatatgtgtactgttttcatgttaccttaagctccttatgattatgggtactaaatagagtacaatcaaatggcatttcaaaataattaaaagagttaatttggggatcagagttttctactggaagaaggattaaattagtatgtattatagaaggccagatttctctgtttagatgagtaattcttcctgaatcagggtaaaaatcatgccactttataagatgctataagtcttatgttccacaggaagggcgggaaagaatccagcgcccttaagaacttcctattgtctaggcaccttaggcattagatcttacaaaagctctgggaggttgatttttatcattagatcattttaagtcatgataagacagagacttagagatgttgcataatcttccttgcctagatccctagagtcatctagtagtaaagatgggaattagaaaccaggtctgttggacagaagccaaggcccatcccagtcagtagaatgggagagatgacacaccattttgtcatcattcaaataacccctttcaggtcagaatctcctaaattctctaaagaaaagtattacaggagagtgctggccaggtggagagactcacagaatcagatacacacacacacacacacacacacacacacacacacacacgtgtgtatatagactgtatgcactgtgtatacatatacttcttcaaaatatattcctattataaactagggaatacaatttgaggaaatgtaaaaatgaacatgtactttttttggtttgtgtatttgattgagccaagcctgggacagatgacctctgaactggagtaatatggtgtaaacaatccccttgcctttctggtatgcccctttctctttctctagaccttcttctcagagctctgacttagcttctgatgtagctggcagaatttcttctctctcattcccaccaaagtatatatctgttgaattgttgaactggattatgtcagaagcattaattggaaatcatcactctgtagagaacaacaaaaacacaaaatctcatgaccaaggaagagcaaaagaacttgtcgggatttctcgacctcacctctcagaatgttgacaatgaactacaaccaaaacacaaccatggcaacaaattagatatttgttgaatcaggccaagacacagaaatatactgcatgccaaaatgtaaaggtgacatgagtgatcaaaagagagggaaagtgaaaggtcaagggagaaactctcagcatgtaggtacagaaccatttccatgaggtcagctacattccaaagtggctgcggcactggatgggagctgttgggacatgctgcacagcccaagacagtctttgaaggtttgtacccaccctcgtttcctggagatttatgaggccagttcagactctgtcttgccagtgctacatcaaaaacatgcatctacactcttcttaaatgaaacatacatctatactcttcttaaatgaaataatagacatcacaataagaagggctgggtgtataggtcaggcagatttcactcctctttatggatagattattttggtaattataaaccgaatgggcagaattaattcatgtttattgagcattgaattctggagcctgaaatcacaatattgtatttattctatgtgagtttcttttttccttctttcctctcttcttttctccctcatcctttcttttctttttcattcaacaaatgtttacttgtccttactctaccaggcactgctctaggggctgagaaggcatcagtgatcaagatagatacagcccctgacactgtagaatgtatcaagactaaaagaaaagattgtgtgaagggtttctttgaaagtcctatgtgttcatttctgtaggaatgatccaggggcttataaataaaaatagagacaagttaaaatatttcatgattttaaatatgtgccaaatattttaatggtacactctggctgtgtatagaaactaagaaactaagagaactggaggaggtaaggcatatgatgggaagaagttgctgcaccaggaagcatagaatagttcagatcagtggtcaacttctagaaggttctgtggtatgtaagaggcgatgcctctgcccagagacagagcaagtgcctggggaatgtagctgatgaaatcatcagaagacctggcttatgacaaaagggtgcatgggaagttcaagagactgaagaaattgtcagagtggcaaagcagcagagaggggcatacatgtgtgaaattaggctgtaaaaattggaagtgaccaatcatgcaggtcatcataagagttttggtctttatcccatgtgaaatgaagacttagatatgttttaagtatgccagtttgtgtatgtctctatgtgtgtttgtaagagaggaaaaaaaaggagggcaatttttggaaatttcaagtgtactgtggtggcagtgaggttactgtaaggcagtaaacttaaaaaaaaatgacattagcctgcaataagttaatggccttaaagtgagagagaatagtcagctttgagtaatgtgaaaagataaaatccacagggcatgcagctggctgtatttgatagaaggttataaaggataactcctagatttttgggttttgtagcatatagatgatagtgtcattccctgcaatagaaaacactgagggtagagtcaatttgttggagaggaggacaattaactttattttgaaactactaaatatgaggtgctttagtgatatccaaacggtgatatcaaagaggcagatgaatggatgggtttggggctcacaggcagtctgtgatagagacactaattcatgagtcgtctgtagtgaggtgacaattgaagccattggcccagatgggatctttttgcttaactgtagagtataagaagagggcgtaggaacaaaccttgcgaaataacatttcttggccaactaatgagattaaatttgaagtgaagataaaatagaagtaaacgaagatgtagggggaaaaccaaaacagtcttgtgacatggaaacaaagagaaaagagcattttaagcatcagcaagtagtctatagtgcgaagtaattcttacaggtaaaataaaatgagaattgaaaaacgtttaatctaggggtcactggcaacccaaggtaactcttttacatagaaggaaggggctaagggccaggtagaaatcagttgaggggaaaatatatcatgttaaaaaggaaaggctgaacacacatgaaatagaaaggatcatggtaagaagaaattggacctaaagcgtaggttccatggacagcaaaagttagctctctactgacatttgagagacaaaggagagggtaatgtggatggatgctgaaaagtttgccaaattcacagaagtgagttgagggagttagcattatatggcctccattatctctctaaagcatttggctattttttgagggtgaaaatattaaattgcattgggaattagagcagaagtaaaacagagaaatcaggcaggagttttgtattagctgcctattgctacagcagtgctgcataacaaaccaacccaaagtgagtgactcaaaacactaggcttttctttaatttgtgtttctgtgaattagcttcataatgcttctggagttgtctgagatttatcacatattttgaggctggttggctgtcactgaaataggctggcttcattgggttacctgagataaatgactcctttcatctctagcaggccagtccaagaagttgtcatggtcaaggcagagatgcaatagcagaagtgggaaggtgcaagcatattttcaagcatatgtatgcattatatttactaatattctaattctattggccaaaccaaatcacatacccatattcaggatcaaagaatggggaaggagattcttctctgcagtgggagaaacaacaaagtcacgtggcaaggggacatgaatacagcgaaggacacggaattgagacccttaatgcaatcaatctacaagtcaccaatagtattaagagcacattcgcaataatttaacttcattggatagtggaatccaacagctctattgtgtggatttctccagcaacatttgattgcttaagtagaacaccaaaaagatgttttaaactatatgtgggaattgctagaatgtatgaagaaagtgcagaaagacagataagcaagaccatgttagatataagtaaggctgttattgatgtaaagccattttaaagtatccactggctaatgagtcaagtgaagttgtgggagaatggaaaaagcggggcttgtgaagccaaaagttactcatagtgaaaatagtttaaaacataatattgaaaaagagggggttgaagtcaggaagagggtgcttgaagttttcagatagaacaattttatgagataacaaggtctaagaagtggcagttttgagtagggagctgaggtaaagctagtaaaaggggaaggcaaaggaaatgcagtcagggaagaggagagtgttgagtcattttggtaataaatgaaacgatgaaaaatctaagtctagtgctggatgtgcgagaggcagtaaccaggagttcagcagataagtgtggggaaagggaaatataatataaccaaacaacacaggatgcaagagctgcattttatggtctgattgatatagctgttgttattggggagaagggttaatgaactagatgcagcgaagggaagcaaagatgccatcaagattttctctcaaccttgaaacatatgggctattatacaaacaaacaaccaacaaactctgggttgtaagaaaggcaagatggaggaagctacaacttttctttgttgagaatacatacagttttggaatgagtagcgatgccatgttgtataaagttgcctagccaaactgagtacagatgttccagaataggacagagaatgacaaagttgggaaaggaaatgtgttaaggaacaaaatggtaggagaaggcaacagagcaacattcacccttcctctctgtcatctcagtggttcactggcaagaggccaatgactcctgacagtaactccatctctgtcctgttcactttccccacatttatctgctaaactcctagttactcctcctcacacatcaagcattatgatactgagcttatatttttcatcttttaatttactacatcttttctctcctgggaaggacagaaaccattctcacacttggtgaactcagagtccttgaaggaaaataataaaaaattgtggagagaatgagaggttgcacatggagattacacagggataacattgttatttactttctttttcatatgagagaaaaaaagagaaaacatataagaaaaaacatgaaactaaatatggcatatatttatccttttaaatataacatgagtgttaggaattataacttattacattaatgtgtctagaatataattgaaggaactaattgaagtaaaaattaaacagtatgtgatattgcacaaaacttgaattcacgtcccagttttgtctggctcatgatcatgtctgtcctggtaggggcattgtaaatgcttaattcatacatttgggaaaaaatgaataaattgttgtatcttggaaaagtataccaaaaaaaagtatttatgatgctgagtttttctcttcctattctcctgattaatttctatccattctcagtattaaacaacctaggagatatggacttggtatacagtagatgctaggaaatgatctttggaatctaaatttgcttatgtgaagttggaggtgtcaataaaacctatttagttattattcaaagttcttttgctgtcttctactcatacttgcccattaactcaagccttgcatgttagcaaacattaatgatttttcttgtagggctgacctatcatatttacacacccacactctctgaggtaatcttgagccaggctccttctgattatatttcgctttttcatgctgttgtcccagaagacgttgacgtcatccagagacacagtagcgccgtccgtcttcagaggttcaattcattctaccatccagaaattctgccgacaaggcggccagtgttagaaattaagcttgtgacacgcaggacatggtggagtgcaaacattggtcagtgcttcctctctcagccacagaggaaagccacactgattggtattcaggaaggggacctcctgtttcgaaggattccttcatgctgttcagcaatgctgtttagggtggattttcccatttgaacggcaaagcttaaacacaaatattaactacctgaagctgcaaatagcagcatagtacattaaaaaaataatgaatatgttaaccagcctctacccaaccaagaaaaatattacgcagagacaaggctgattttagaaaaatgcccaaggaaacattaataaaaaagttgagtttcctttcaaagtttgtttttgctaaacattcatagttttgccttttccaatccaattttattataagaaagatctcccacatgtgtacctggcattccttttaaaataatcagtaatacgcacacacaaaaaatggaaatagtgggtgagttcttaagtgtgacagaaagaaacggcaagatatgttacaaagaagagagacacttctttgaatgcacataagtttgtagcctctttagttataagcagaatttcatgtccttattattttgactatttacattttgatattgttcatttggaaaatccaagcctatctgattcttaactgcaaggtttcttcccatgaaatcactgaaggtgcaacattgcttgtagtcagtagaagactgaaattttatggctataattccaggttagggcaacagatggacattctatcacctgttggatagcttctttggtatttatttctgtccttggtgaagattaaaactaaattattgggcttgaagaggcagttcacacctgtaatcccagcattttgggaggccatggctggaagatcatttgagcccaggagttggagaccagcctgggcaacatagaagatccctatttctctaaaaaaaagtctaggtatggtggcacatgcctgcagacccaactactcaggaggctgaggtgggaggatcacttgagcccagaagtcaaggctgcaatcaaccatgatcatgccactgcacttcagtctgcatgacagggtgagaccctctctctctctaaagaaaagagaaaacctaaatgattaaaacattctgttcaataattctcattctcaactggtaaaataggaattttacactaaacttagcgaataacaaaatgcttttggtgcactttctttgttcagggctctttttctcaacacttatgtcattacttcctcataacaagcctgtaaagttggtattaatattaatccattttccagatgaggaaactgaggcacacagagatgaaaaactgtccaggtggttgagccagaattgaaatgttggctgtcttcatctggagcccacactttctaccttcctgttgtgttgtaagttaaactcaggttgaaattggctaacttcgctttgcctggtttcctgttaatccactgtcatttaatgttggtttttgttgatttgttttgttgtttttgtttagttttgtctaatttgtggcttataaatcttttctgtaataatgacagtaaaacatggggcagggcacctgggttctagtcacagcctagctactaacttcaaacaagtttggatgttgcataaactcagtttcctttctataaagcagataaaatgagagagcataactttctgtctcataaggttttatcctccaaatctactgtgctaacaaattaaaaatgttatcatagatgctttttcactaagccaaagggatgcaccaagctgaagtttatggaattcagtttgacaacttgtatattaaacttctaaattatttttctgaagaggatgttgaaactaatggagaaaggaaggtttaagcttgttgatgaatttttattcatccatttactccacttcaagagttagtcaagaatgagttgtgacatgtatttgaaacaattaagaacaatgactgaccacctaggtttctgtaatatcgaaaatgtgggaatatctacaaggacaaatggatggtgaagtaaattttggatgccaagtgataccttgtgtcactcttccaggactgctgaaactatttctaggaaaccacacacaggcacatgccacagttgaaagggtcatcataatatttgtgcgttcttagcataaattaattttgaagactattttaagacaatttgttattttcaaacatttatttggaaatctatttattctcacccacataggaatatttatcgacatccctaagcttccattttagttacttccttgtatagtattcttctgacttgaatcttggatcaaattcctcagtttttacattgtttaaaataagttatcctgccatccttctctcccaagctagtggtatcctataatctatgaaaatgcactgaaaatgaaggaaaaccttcagttaaacattctaccttattttctgaaagggataattcctcccttttatcttttagcacagtcttttgaaaggatgtggtcttcatggctggaaagccaggatagtttttgtgtggtttttgataaattgaggcccatcaatttgaatcactagacactgtgcttgtggttttagcactttcttttctctgggacatcctgccccctaccatccttaataactcagcttttctgttacctcgtttgatgactggtggagatggtggagcagcaggaaccaccatagtacattcaatgaattatttagtgaatcatcctataaatatttagtgagcaccttctctacgcaggaatggttttaagtactaaggctgttacagtcaaatgccaactctgtactcctgctcacacagtggtgacattctaggaatattgaagagagaaaccaaaaatcaattatctatattaatatttgtctaaatgaatacatataccaatgaataagctaatattaaattatgatataaaatagaagtaataagatgtaatagaggtgtatgggctaagagagggatatgttggtgtagtcaggcttctgagagatggcttttgaagggataccatagttaggagaacagcaagccacctgaagaacattttagacagagggaacagcacacacaaatgctgtgagatgacagctactgagaatgttgagtaataaaaagaagataaagtgagaaagatggaaattatacaggatgaggtctgagaggtagaagaggaccatttcatatatgcctttatagatcatggaaagggctatgtattttgttctaagtacgatggtgtaaaacaatgattctcaaagttttgtgtggattagaattacatgagtgacttgctaagacctaagttattgggtccatcactggagtttctgactgagtgcttctagggtagagcaagaattttcatttccaacagatgatgctgacactcctggtataggaaaaacagtttgagaaccattgctgtagtcaatagctgttatgtgtacctactcagaatagatttcaccaaaatcgtacaagtgaatcttgattttcttatgcaaaatgtctcttctgtattcttagccccagcaatgtattttattaccttggacacaatgagttattcaatgatggacataagacttttgtcagtcaattgaaatccaatccaggaaaactctagaaactgttggaaaatgaaagttcttaagctaccagacaagaagctcacagtcaatacatagggaaattctctccaaaagctaagtcaatgcagatgagcgctgagctgaaagatgacaagagactgagctctggtaccttccgtttatacccctggaggtagtcatgcctaggtcaattatacttctctgatttctatttccatcactaatcttcccgtcttatggtttaggaaatttctctttgggttctgaaacaactcaaaatataaatacaaataaaaagctatagtagatataccacttttacaaacttagatgcaccttgcttcatcaccaagaaccagataagtgagtttacattgctaaatactactctgtacatttataaaataaataggcttcatataggcaaacaagatatttcaaaatagaaaatctcaagcaaataggagaatgaactagttagccaaattaacacaggcatttgaaaatgtgctaaatagcacttggtgacactatattattgctagcagcattgttaccctgactattatctataatatgacccctaaataaaatttgtaattgtattcttctgtccttttatgtggaaacctcacatcctctacaagttggtgcatgttttccattataattatacaaagcagtttctcatcatttagcttctgtctaaatgtgatctgttcaaatagcctttcttgactgttctatttcaactgtcatctccctcctcaagatgaagtctatcaagccatcatatttcgttactttctgagaaaacattttctcagattattttgtttggttattttttatctcttagaatataaactatatgaaagcagtggtgtattctcttatcattaacattctgtcacccaattgatatttttagaatagaaaaatgaataaattgtacacttttgcctttccttaaatacattttaaaaatttgagtgtttcttttctatatttgtatctatacctttggaacaattttaggtcaaatttcattttagtcacaaatcttctctggctaccatcacccaaagcaagttcacttgcttctgagcataagaactaacctgataatatgaaaattatcttgtccctacttgtgttgagcttttctgtgtgcaaacttctcttccttatcagaccttcctgaagcaatgccagtattttttatttgtatttccactttatcaatattgctttgcatagagcacagacatacaaatatttgttgactgcatgaatagatggatgcatatttaagggccaaaatgcccatagtcatttaaaactcttgtattctccaaatagatattttcttattatatatagtcttaaagactgtgaactatgctgtaagtgaaaaatcttaatttctgatattatattgactattcatagaaactgtacaatatttatagaaataatcaaagcagatattcatagaactcatgaaataaacaggtgaataagtaaaaattaaagtatttagtaagatgatgagtgggaaaatatggggactgcctgtaattttttatttctgcatcagctttatgattccaacatgctgccactgacccgttggccataagtgactcaaagtgttttcctgcatgagtgcaggatttgtgccagcctctccatgcctcctcccttgtccaacctcatgaccccttcagcatggacttctaggacaaggtgtggactttggcagacctaaaatgtttcggaaaggaagctggtgctttgggggcagtggtaagtctgtttttagacatgttatttctgaagtagcagcagggtactgagcatgacatctatatatatggagttgtatgtagttagaaatatggcattgcagatatgagagaaagataacatcgttggtcttagaatttgagagtcataagcatatagtcttaaagaaaatgtggatgaatgcaaaacacaagttagtggtgatctctggggagagacaacggctgatggtgttacatgtggggaggataattgagggataatcttcaaagtcattggtaatcttccgtaatctggttgatatgttttattattttttcaaaaatcacatatatatgttatatatgaatgctatatatctcacaataaaaagatttacaagtatggctgcctttcaaaataaaaatgtgcaatggcaaaaagcaaatatttaatgcttcaaatatcttagttaatttcctaaaatgtgattacttgaagcacttagttggaataactcaagtgcgtacaacaatttgcctcagcttctagctatttcagggacactcttggatgtaaatgaactcatgatatttttatcaattctgtttactcttgtgtgaacaaccatgactattttctcctcacactgaaggctcctcctctgtaaaagatgatttccaaacatctacaacaaaaagaatggagaaatttgtccccaaattgaatcctacattaatgaatgcatgacatatgtaccagttacttgttgacataatgatgtttcattacaaaccaccctgacatttattgccttaaacatatcatgtatttgcaggttgtctgggagactcttaaagtcttgagtgggcccttcctgcacctgcagtctgctgcagatgagctagggggctctgctgatcttagctagggtctcctatgtctgggatactctgtcagcttgtctaggacctccgctggaaaacttggacaattcttctctgccttacttgtcccatccactgagcattttctcatgccaaagttagaagagtaaattagaaaaaagacacattcaaggacttttcaggagtttccagactctgttgacaccatatttgttcataattgggcaaaacaagaatcaggggatagaacaaaatgctgtccagagtgggagggcgctgcacattatggggcaaagagagaggaggagagtggggccattgatgcagctcatctaccaccacatgttcttcctcccctcctggcccttgctcattctctttctatgatttcctgcctattaggattctacatgctagccttcccttgaggctcaggtcaggtgtccatgactgtatatgcagttattccagccttctctcccgtccaaaacgttaaggcactcactgtttgcttccatcattttaacttttttatctccattgtcgggtgttgtttcataactgactgtctcatcagaaaatgagttattaataaagaatatttgttttgtaaccctgaaaaatctggtagaaacagggtagaaaatagaccctgatcaatagttttgattatttgtccattgatttacttttataaatctgttcagtcataaatacacatggcccttttctagagtcctggtatgttaacattgattcttttggcaactgggtataacccatcaatttcttccttctttttatttcttattttcatgtttcttcctatttccttccgtccttcttttctttttgaaaagcttttctttagattaaaagaatttgacttgttcagaaaaaaaggtctaaaaacccttttcatcacagttaattagatttctgacttgttctctatagccaatatttcttcagcacattacttgagcacacccctaaaaacaggtgtcaaaacacattaaaggcatggcttcctaaaacatcaaaggaaactgtgttctctattttcataaatgccaccacaaagctaaaagcctgtctaagttagtcacgtgagccattttactggtcaagatatgggtaatttgagtgctgccctcggtattgatctcatctcatttatacgtgtttaaaattctacattaatccaaattctactttctgaataatttatgcagaggccaaagaaatgtcagtttgcaaataattggaggacctttacagagattccaggtaaaagtacagagctgaaaagtagaaagcaacagtgcaaatcttgtcatgtggactgttcaagggcacgatagttatcaaatccaacctttcaatttcacagtctagggtttaatgagagcccccagggcttaggtttcccatcagggaagtgaccttggccccagccatcagcaacaaggatttgaaaaacactaaatccataacccacattagattgatcccatgtaaactgggtggtaaaatgggaaatttgagatgcaatatttgaaccttagatcaattgggcaagaaacataataaggcattattattctcattccacagttgaacttcttcaaattcaactgtataataaagaagttgaatgccttgctcaagttcacacaaccagcaagtacaagagtatctggtttatctggctctagaatcactttcctttgctttctcaacagatggctggatgcatgaccttgtcatatacgtaaaacatccacagactaactggaaaaggacttcacctcagccaaagtgagtgcattgcagaataagtgcagagagcttaccttggtttttaaagatattgcaatccgttttaattggggatctcattgcaatgtgctcctatgtcttgagacaggtaagcaaaacaaaacgaaggtgattagcatggggaaagatggggcatatttgaagcaaacccactttttaaagaatttcctcattcctcactctttattctttcacttaaaacctactgtgacatttaactctgtttttcatggcaatgtatctttttctccttttcattttttttatttctcctttatctcgaataaattgctccatgaaatttttctctcttcacttcctaagacaccctagacattccctcacatgaaatcaaccaggttggtctgtctgctcatgcctccgctgttctcataaagaaagagaagaaaggggctcaatgcctggagtgtgtgaaaatggggtaaggtgagggcagagtgtggcaggtattgtgctgaggccatgaatgcataatcactactgtcacagcaaatagattctgtcatgaggaattccatggttttccagaggaaatcagctttccctgcaggctgccaagcccaaatgagctccttacagcacctgcagatctgagcatcaagcaattattccactatcttgcctaaaaacaaagactttgctaccctttgacaacctctgacctttttcagctaacataaactaattatatttgcagcaggaggggaggaaggccttcgtagtcctccgtgggagttgtctttcatgctttgtgccacgttgtcagttctggcaatccaaaaaatgaccacccttcaatcaagggagttgctggacaaagcacttaaagagatacagggaggcccttatcacaagtaaatttcactgtctaggcttggtcagagtagcccacactgtccagttagcaatagtacaagagagccattgttaagtgtcacttagcagcaattacagcctggtcaaaacagtttttgtgtgtgtgtgtgttgttttgtttttagacaacctgttaatgggcccacaattaggtgtaaggaataacccgggctgcaggcactgaagcaaggtcagaggttaattgagactttctatcctaaaaatctgagtttttgcaactttttgctgagagaatagtcttaaacaaaaaggagataatatgatacaattagttggaaagcaggagggtcaaaattcccagatgagaaaggaaaactggccaaggaaatcaggccagagggaccacctgggccacttcagatgccaagaatatctgtggccattcatctggtggatgaggcacaaagcggtgtgccctccattcatcacatccctcctgtctaccaaagaaaatacaaggtcaatgccataaacaggaggcatctcagggtaattgaaattccagaaacggcctcattagaatagcttacaggcaatcatgtttttcttttcctattgaaggtatattcatgtcttgaaattgcatggaaggccttctttgtggtggcagggtttgcagagggactttctgatagtttttgaaggattgtgtctaaataaacggcttccttcatagctgagaggaagaacccaacagaacctcctgggcttgctgactatggcgtggcacatgtaacgtccacacctgctcccttgctcttaactgtcaaagggcccctctttctccattccttctaggtcataatcaacgtattgtgtcttaagcagctgttctttatctggtatcctgaaactactattggaggtttcttggctttaatctttcttacagtttttctttttcttttaaccctttcccttattcacacccgctaatgcaaactttgacacttccagctggcagatccctctgattggaagtggactaaaatttgctaaatcattttgtttctttccttttttgttccagtacagctggtgccaaaatgtgatgatttgttttgctccagtcactgaagtttttgttttcttttatttcaaccccatactggcttcccagcttgatgctgagtcatctggtgcaggtgttctaagtggctggcatttatgtcacttgcagatggtttgggtaaattacacgatgttcctgcagctctgtggaggctctctcaggtccctttgatcctggccttcctgcgggtcttgcacatatgcagaacttcagggcactaggtgaacttttagatggattctactcaaagctggttgggttgctatgggcctcacagtctgatgggcttcaactgtgggtaagagaggttaactaaaagaaagaaccctgaaatcacaatgtactgcagcttcacctacatagggaattacatacccaatgtgcagtagaacgtaagttaattctacggcttcttaagtaaattggaacaaagggaccacattttgcttctgaagaaggagaaaggtatgtaggaaagtaagagctggagtagggaaattgttaagtattaaacatatgtatttagtgttttctcttcattacgtttgtctgaccccaaactgtctctagcccctgttctaatgctcagtgcaaagactggctcataggcaagaatctcaaaatctcatctacttatactgtacacatacagcttctattagaaacttacaaatccttgctaccttctatctaagaaggctgcttttatcatgaaacaatacacaccacttgggaacactcaacatcttctcttcctgtaaagatatacaacttagtgagagaaatttctgtctggtcatagccaaaggcaagacatatcaacttcaattttcagaataaagtttttgggaaagctgtgtcttcctaggactgcagaagtcctaccattgtaggtgatatggtttgactgtgtctccacccaaatatcatcttgtatttccacatgttgtgagagcgacccagtgagaggtagttgaatcatgaggactggtctttctcatgctgttctcatgatagtgaataagtctcatgtgatttgatggtttttaaaaaggggagtttccctgcacaagctcttctcttgtctgccaccatgtgagacatgactttcaccttctgccatgattgtgaggcctccccagccatgtggaactctaagtccagtaaacctctttctttcataaattgccctgtcttgggtatgtctttattagcagcatgaaaatggactaatacagtaagtttgcaccagcagagtagggcactactgtagatacccaaaaatatagaagcgactttggaactgggtaacaggcagaggtgggaagagtctggagggctcagtagaagacaggaaaatgtgagaaagtttggaactttctagacacttgtttaatggctttgcccaaaaggctaatagttacatggacaatgaaatccaggctaagatggtctcagatggagatgaagaacttgttgggaaccagagcaaaggtgactcttgctatgtttcagcaaagagactgggggcattttgctctgccctagagatttgtggaacattgaacttgagagagatgatttagggtatctgatggaagaaatttctaagcaggaaaccattcaagatgtgacttgggtgctgttaaaggcattcagttttaaaagggaaacagatcataaaagttaaaaaatttgcaccctggcaatacaatggaaaagaaaataccattttctggggagaaattcaagcaggctgcagaaatttgcataagtaacaaggagccgaatgttaatcaccaagacaatggggaaaatgtctccagggcatgtcagagacatttgcagcaacccctcccatcgcaggcctggaggaaaaaatggtttcatgggctgggcccaaggtccctttgctgggtgcagtctagggacttggtgccctatgtcgcagccgctccagccatgactaaaagaggccaaggtacagcttggcctgttgcttcagagggtggaagccccaagcattggcaacttccatgtggcattgagcctgcaggtgcacagaagtcaagaattgagatttgggaacctccacctagatttcagaagatgtatggaaatgcctggatgcccacacagaagtttgctgcaggggcggggcctccatggagaacctctgctagggaagtgcagaagaaaaacgtgggtttggaaccctcacgcagagtccctactggggcactgcctagtggagctgtgagaggagggccactgtcctctagacctcagaatggtagatccagtgagagcttgcactgtgcacctggaaaagccacagacagtcaatgccagccagtgaaagcagccaggagggagactgtaccctgcaaagccacaggggcacagctcaagaccatgggaacccacctcttacatcagcatgacctggatgcgagacatggagtcaatggagaccattttggagctttaacacttgactgccccactggatttcagacttgcatgaggcctgtagcccctttgttttggccaatttctccctttggaatggctgtgtttgcccaatgcctgtacccccattgtatctaggaagtaaccacttccttttgattttataggctcataggcagaaagaacttgccttgtctcaaatgagactttggactctggacttttgagttaatcctgaaattagttaagattttgggggactgttggaaagacatgattggatttgaaatgtgaggacatgagatttgggacagtcctggggcagaatgatacggtttggctgtgtccccacccaaatatcatcttaaatttacatgtgttgtaggagggacccagtgggaggtaattgaatcatggggtggcagggtctttctcatgctgttcttgtgatagtgaataaatctcacaagatctgatggttttaaaaaggagagtttccctgcacagctcttctcttgtctgctgccatgtgagacatgactttcaccttctgcaaagtttgtgaggtctttctggccacatggaactgtaagtccaataaacctctttcttttgtaaattgcccagtctcaggtaagtctttatcaacagcatgaaaatggactaatacagtaagctactgcatgggttttcacagagtgatcaaccatccaaggagtttcttaggattgactctgctaagatcaaaacagtcctggcaaactgtggccaacctaatgtgtgtattgaattacctgcagaacttgtgaaaaacatagacacctgagtcccacccctacagggtctgggggagccctgagaatttgtatttttaacaaccttcaatgtggtagtgaaactgccagagcagggctattcgtggagttggaaggagcagctctgtagaacttgtgaaggggagcagatgaaagtgaagagcacagatctggagcagtgcatatgatacagaaaggcatactattttaagtgactcacccccaatgtatcaggaacttattgccaccataaacaacaaccagaaaaatctcagtgacatgaaacagtgaacatattctcatgttcacagaacagcaagtagaatatggctcagctggtatgggctcagctgggtggttgtatttcagtctgtaagttggctgcaggtctctcccatatgtcttagtgtggtcaactgacacatgttttacttctgttgagagtcataagtggaaacatgtgacacttcagaaagcttagactcagaactggcacaatatcgcttttcattggctatcaccagtcaagccccaaaacaatggagtgagcagtgtgctcttccaatgaaagtaaggagagagtaaatatttcctaagtaataatctaatctactatagtgatctcagagttttagagtactcaatctaattgggtatataattggatatatgtcagtgactggtatacaattgctgtatgtctaataacctacaacaaactttcagattcctttaccatccaggtaggaataaataccaggaagctgaaatatttactaattgctgaagtacatatttgtctcaagccattttcccaccttggttgcccaataacttggaatatacaaaattcaatgtttttccaatttataaatgtttggttaggcataagagtactgtattttatttttattttaactgatttttttttattttgcattttgttttctttattcttttctttaaagtcctcaaccagcttttttttagttaaataaacctgaaaatttagtggattttccctgtgtaattattacaaatatttcctgtgacagtgatatatcatgtaagagacttatagataaaacacaaataactactgaaacaagtaaatttttaaaaaatcattttgaatctataacacaaatatactactttctaacaaaagactacactagaccatcttgttctttaaacatgtatgttgttcctgattcttggaaaaaaatatttattagaatctatcaatatacaaaacttaaaaggtatttattatccttggcagggccttcaagaggatcaatatttccaggatgttggtattagcatccattgttcgctggctagatcttttccaacagagcatgtgactctcatcattacagcagaggaatgcatttatcaaagttaaggaagtcgtttgccattcggatggcccaagaagcataaatatttatcattgagccttgtgagaactctctattataaaaagattggctaatttcttaaaactactccttcaataaggacccaggttatgtgccatggtatctgtagctttctggctgggtcagggtgacccgcacacaaccctggcaggacgcccttggacacagtatttgcatccctttggtgtgccaaggtatcaagcattcacagttcacattgaaaccactaaacgaagagctgtgcaaacaggtcatcagtttctccagaggggaataatcttacaactgttacgaagggtcaaaggtaactttcattttgagatgctaattactccaagaatttgatgcaggaggcagctggttaaaatgaatgagtgctgaagcgttgaaggggaaaatcaaatagatggttataataaaagtgcaatatgcaacctaataagtatgcagagaataagggacaatattgttaataaacatctattagtcaagatgatctttgtagagctgggctctttaatattataactgctaatcacatgcaattaaatttaaatttaaggtggttgagattagaaattcaggtcctcagccacagaggccacatacaacatgttcaatagccacatgtggccattggctaccatattggagagcccagatatagaacagtttcattactgcagaaatttctataggacagcaatgacctggagtgttttgctattggaggggttttggacttagtgcttttatataggaaacatgatttttttaaagaagccatcccatggaatgcttctctcattccagtgctgtagtaagggttgccctgaaatttggacctagaaaattcacttatcataaacgaaaaaactgttactactatcaataatatttttgtcctggtgaatatttacattgtaccacacactgtgctagttgctttatacatattgtgtcatttaattcttaccttagagactaagatctatctgtgaattactttgagataaatcaggttaagagaaaaataaaaactgactttagaccacaattaagtaaatatatttaaacctaaagcaattattgctctttgagagagagagagagagagtgtgtgtgtgtgtgtgtgtgtgtgtgtgtgtatgtgtataactggcagcccattgttactgagataactacacagaattaagcaataaactctgccagagcctgggatataaggacaggaataaagacgattatcagagacacgggaaagaaagagaaagtgagaggtatttgaagattcactaaagaggctgagatttagtagaaatagttgagaagcctcagaaatttggttgtaagatccaggcaagcatggagaaaggctgcactttagagatttgtgggttcccaggctaactccagaaaagaggattagggcagcaagactgatgctgaaaccaccaaatggtcatattaacatccgagtttccttccaagatccagtgcatagatgaaaggatttaagaacatgaggttggatgtggattgctcctttcaaagacttggacaaaagaaaagtcacagcctcttaatttctctcagtgaacctcagcctagccattaaatttcagaggaagcagatggcacacattcaatgttctgggatatgactgtacacagtcagactaagaaaaggtcacaaagatgtaaaaaaaataagtgttttacatcaagatggttggtaatgaaaataccctatcctactcagtttatagtaaatcgcttctatatagagtaatttattaaaatctcagaacattaagaattaccaagtcttgatttattgcagaaaattttgccatggtgtttccatttagaaacttatttcttatcttacacaaagtaaaaaaacaatctctttagcacctggtattattagtgaggtataactggggtgacaatataatttattatccaaatagagacacttttgagaatgaatgtaattgtttataattacagcaaaaccacaggtgtaaactagaactgtccaaggcaaatcagggcaaaccaacaacctaggtatagaccacagctggatgcaattggactcaagccattttcccagtccagctgctgagtgtgactcaaaggctactctgctgtcagctgatttacaagctgattgaaataatgatgcaaaggcacaatgatgaagatgtccaacacccattttaggtaaaaataactagtgtaaagaaaaataccattgatcattgttgttgagtttttatttttaaagaaacagtgacttgataaaatacatccaagaaaaaagagtctgataaccaatctctactcagcataggagggcatttctcttcaatttttaaaataataaattaaaataaatactatctttaaggtactaaagatagcaaggttagatatactagttcagctaatctacattcccaccaacagtataaaagtgttcctgtttctccacagccttaccaacatctgttgtttcttaactttttaataattgccattctgactggcgtgagatgatatgtcattatagttttgatttgcatttctctaattatcagtgatgttgagctttttttcatatgtttatgggccacagaaatgtcttcttttgagcagtgtctgttcatgtttttttgtccactttttaatcggttttcttgtaaatttgtttgaattcctgtagattctgaatattagactttgtcagatgaatagatagcaaagattttctcacatttccccttactgggtataaacccaaaggaatataaatctttccattataaagacacatgcacacatatgttcattgcagcactattcacaatagcaaacacataaaatcaacccaaatgctcatcagtgatagactggataaagaaaatatggtacatttactccatggaatacaatgcagccataaaaaggaatgagatcctgtgttttgcaaggacatgggcagagctgaagccattatccttagcaaactaatgcagaaacagaaaaccaaacacagcatgtcctcactgataagtgggagatgaacaatgtgagcacatagacacagggaggtgaacaacacacactggggccttttgggggtgtggagggagggagtgcatcagaagaaaaagctaatgaatgctgggcttaatacctaggtgatgggttgataggtgcagcaaatcactatggaacatgtttacctatgtaacaaacttgcacatccttcacatgtacaccggaacttaaaaaaaaagaagatatactagttaaggtgtatccttaggcattagaagaacttggagattgaggtgcactactggtattcagtgagtaggacctagagttgtagatgttctacaatgtgcggaatagtctcacacaatgaagaatgaacctggtcttatgtgacattcatgtgggtgaaaaacatatttatatattaagcctaaaacttaaattcattttacatataaatacaaagtatctcttttacactgtattaatagcaactaccagacacattgagaaaatatattctttattttgtttggcaatttctcaataattttttgctatttcagaaaatcacatcacagaaggcaaccctagtcattatttttagtagctacacaacatatctacatctgtaactgacatttaaggtgatcctatgaatgagtataagcatgacaacttaattatatcttccaatgtagttatgtccaaacattgacatgttgaaatacttattttatcataaattattttcctcttaatttcatttgcaatttatttttacaatataattagaccattatattgacttaaagataagtatgtgggtagtttatattatctatggatttcattttagagtagtaaaggctgtgttataaaatatcttatataattagtggcctgatagggctgtggagcagggctccaaggcagtgctatttcaatgaggtctcagaattggcagcagagagcttgttaaaaatgcagattcttggactccaccccagaccaacagaatcacactctctcatgcagcatcccagtgatatgtgatttatcaagccttccaggtgattcttctgctgctcttatgcatgcagtgatttgaggattattgctcacggtaagaaaaacatgagtaatatattgtcttcaaagaacctatgctctaacaggagatgtaaagatatctttctacttgagttggatgagtaagaaaatcacagggatcatgatcaccaaaaacacaatagaaatttggcaataacctaattccagagactatacactaaacatgacatatcaatagcaaaaagctggattcagagacaagtttaaaccacacaactctgattaaaatgaacaggactcatgctgttaagactctgtacagttctaaaaacatacacagcagagcacttaagccgttccagaacacatcattctctactttttaacagggagcaaacagctgggatgtgttactagtaagccatgttttcataggctttctggttttctttagccaaactcttacaacagtcttcggacaaattattgcctgaagctataggaagtctttagttgtcttggagaactgcagagtaagtcaggtctcaaagacaacatgcccacaaggacttgccttgccacctttggcctttccaccttggaaatgccttcacaaccaattacactattctcaaatgtctgtttatttttaatgactctagttaaatgttaagagttattccgatgacctagttcaagactctaagaaaaaaagcttagacaaatcaatagactaaactgggaggcttgcaaagaaatgaacaagaatctaatcaatatcttaacaaaagaccaacaaatggttgaattcttgtaggcctgcatggttctgaggccgaccttgcttttcaaaagacattaaagagttcaatatggaagcagtgttgtgagaaatcactttctctttctagatactctcatgtccacttttgctctgggaaatgtgtgtgtgtgtgtgtgtgcgtgtgtcttgtttttctaaattgtcagtacagtgaaatagttgtcatgggttcaccaaaacaattttcagagattttctttctgaattttgttgggaaaagtcctgaaacattccctccacttccacacacaaaaaggcagcctccctaaggttcttccttaggttcccccggcacctacatgggtatcggcaaacattattgaatctcaacaagcacatttatttcagattctacacatgaagggttttcaaaatactcttccgtacccatggttcataagcccatggtccagaacatctagtgtctatttttatagcccacaggcaattgctacagctgtataaccctattgagaatgagaaagggagaatgtcactaattcttttgatatcttaggatgcaaatgtctatgtgctaatgtcatctgcataaaagtatatactccccacttcactttggctgaaggcaactacacattaatggttacatccccttttgtactaagagctactcaaggaaacatttagcaacaggtggtcctagctgcacttaaacctttcccctagggaacaacacacgcttatactgtacattcccaggccagtaaacccatgacaaagttataactcccagtagtcagctcatttaggtttatgcaatagaatccatcctcttttttgggaatggaaaatgtattcctttctgaaaaagagtacagtataatagaaggcatgggaaaaaatcattcaaaatttacagatttgggagataataaaaattctaccaatgatcaactttggaatttacagtaataacttaagatttctgctcattaacagtgtcagcatgtataaaaattaagaggtttaagaatcttagaagccctgtgaaaggaatttagaaagtgcaaagatacatgcatttgaataaaaatttggcgcttgtcagaccatgttttttttattgatttttacagggtagatatgatcaaaatattaagagtcatgggataaaatttctctaaggaaactttatcaccataataatcattgagaacttctataagtcaacatactgtgtaaggcttttgaaatacgtaaatagataatacgtaaaccctgaacagcatactgtttcatggctttttttttttttttttgagacatggtctcaatctgttgcccagactggagtgcaatggtgcttactgcaacctctgcctcccaggcttaagcaattctcctgcctcagcctcctaagtagctgggattacaggcgcgcaccactgcgcccggctaatttttgtatttttagtagagacggggtttcaccatgttggccaggatgatcttgaactcctgaactcaaatgatccacccccttggcctaccaaagtactgggactataggaatgaaccactgtgccaggccacagatgactcttatttgccgaattcagtacatcacttaggagcacctgtatcctttgagagtttattacaaatgcagcatctcaggcctcatccaagtcctctgcaaccaaaatgtgcattttgacaagatcatgatttatatatatgttaaaggttgagaagttctggtctgtaacactcaatatttccacttcaaccttctaaactaaagaattgtgtgacttgacctgtcttctaaagaagccttcactttagtgtcattacctttgtcttcataaaatattctgtttttttaataatcatttagaaaaatccaataaaacaaaactacagtcatttgttgctaaatgagggggataatacctcctgaggaatgtgcagttgggtaatttttgcccttgtatgaacatcctaaagtgtacttacacaaatctagatgtacttctaggctatatggtatagtctcttgctcctaagccataaacgtgtatagcatgtttctgtactgaatactgtaggcaactgtaacacaatggtaagtatttgtgtatctaagcatatctaaacataggtaatgttcagtaaaaatactgtcttataatctcatgggatcatcattgtatatgaagtccatcattgacctaaatgttgttatgaggcacatgattgtgaattgcaagcaaaaaaaatctaccttcttatttctgtatctaaacatttgtgtgtttaatttgttcagttacaggatcacattgatatccctagcctagcattattgttgttcagagcaattgcacagtgtattttgaatgagtcaatattaagaataatataacagactccaggtgtggtgcctcacacctgcaaccccaacagtttgggaggctgggacaggagaattacttgagcccaggagttcaagaccagcttgagcaacatagtgagaccctgtctctacaaaacaaaacaaaacattagccgagcacagtggcatgcacctatatgttcctgctacttaggagactgaggcaggaggattgcttgagcccaggagttccaggcctcaatgagctatgatggtggtactgcactccagcttgggtgacagagtaagactctgtctcaaaaaaaaaaaaaaaaaaaaaaaaaaaaattaaaattacacacactccccccaccaaaaaaaagttatctgaaatctttggttaaaaagcaagaaagtgacttctacttctggccaaggaagaacaactgaaaaacacaaaacatatgaaacaaattttgccagacactggacatgaggcaagaagggcgagtgattgctgagcgatggaagtcaaatgagatgagtgtttcatttaccccagatggctgccttgggtacctaggaaaatctcaagaaattccttattgataatagatttgagagtctgcagagaacaacgtagctgaagttggcagggcagagtaccagagaggagagaaatgtagagagcgaggactctggaggtctgcggagggttcccttgtgtatttgatttgtttgtgtatatgaggaaactacctgagactgaggaaagaaccacctgaaaaaattgccactgtcctgtctaactggattcacaagagattggaaatagtgcccattcccatcagctaggttagttacaaaacctcaagattcaaggggcgctgtgtagagtgcacagaaagatcttgccttagtaatgggaaacaatcagatccagactgagtgtgctcatgccacctaacacatttcaaaaacaagactcaggaagataaaactattactattgaataagtaattcagctgtattcctaaacaaaattcaagcatattaatataaataaaagaatattcagcacccaggaagcaaaactttacaatatctggtattaaaccaacaatttacaggcatgcaaagaacagaaagatacaattcattatgatggagtcaatcaatccttcccaatgaatcctaaactccctcggatgttagaattagcagacaaggacaccattaaattttgaattaattaatatcgtttttttaaaaaaaaaaaaaaaaaataggaagtatcattcttttaggagaaacatcaccatctggtggtattttcaggtattgccagtaaagatatttaaaacaggaagggtggtttttcttggtgtttacaaatatgtgtataaataattacaactatatctatgaataaacagctgagcaattgtataaaccatacaacttttattcaaacacttgtataacgtttacgtatatgttattttatatatacacatacaaatatatttatatataagtattcataattatgcaaattgaagatgcaacaataaatagactttctgaaatagttgttctgataattaaatatccagttaccattgttgcgttgccttaatgactttttctgtccctctatctttgccctagggtctttccacaagctttctcttgttctaggataatcttccttccacctttcacttggtcacttcttccacgtccttcagattttactttacctgtcacctcctcaacaagctttctctgataatttagaggcaattaagcctctatcacaaatactctcaggtaattcactaaatcccttgaaatagtatccacatttgtggttatgaatttacttgtgcacttatgtggagaaggtcttcctttcccactaggtacagtgttccatgaggtcacttttcctcattatgcacctttcagaatctaacacaaagttggcacactgtgtgcagttgttggatgatgtttccccacccagattttcatctctattattgaaatgtgattaggatttaggcttcacaggtaaaccaaatgcagcattgaatttcaatctcaaattccaggacatgtggaggtacgaaatcactgctcaaatcagcttgtttaaattccagaataaaaagccctaaatgcttctcaacttatacagtttttttctgcaaatcccaactaaggaactgaacttcacttaattcaaaataaaaaataattctgaaatctgtattaggtttttccagagaaatagaactgataagatgtgtgtttgtgtctgtgtacacaatttcttataattaatctctctatgcatgtaggtcaaacattctggacatgtctatgaaggtgctactgaatgaaattaacatttgaatgggtagactgaatctcttgatgcatatatatgtgtgtgtgtctatgtacagacacacactcattatatatttatagataaatagatagatagatattcattataagaaattgacttatttgattacggaggctgacaatctgcagttggcaaactgggaaccaaagagagcttatggtatatttccagtccaaaatgctggtgggctcaagacccagaaagaaaatatgtctcaatatgagtctgaaagcaggaaaaaaatctaatgtcccagcactaaaacagaaattccctcttatttgcaagaggattaacttttttgttccattagggccccttcgactaactggaagagttccacccacattagagatgtcaatctgctttactcagtctacctattcaaatgttaatctcattcaggggcatccttacataagggcccagaatgtttgacctaatgtctagccactcgatagcccagcaaagctaatacataaactttactatcacaattctaccccttctcatcttggcacatatacgcctctccttaaaccatactgatatggtttggctgtgtttccaccccaaatctcatcttgaattgtactctccatgtgtcaagggcaggaccaggtggaggtaattggatcatgggggtggtttcttccaggctgttctcttgctaatgagtgagtctcatcatgtgagatctgctgatttttttgttttcaggggtttttttgtttgtttttgtttttgagaccgggtctcactctgtcacccagactggagtgcagtggtgccatcttggctcactgcaacctctgcctcctgggttcaagtgattctcatgcctcagcctcctgagcagctgagattacaggtgcctgccacaacacctgactaatttttgtatttttagtagagatggggtttcaccatgttggacagactgggatctgctggttttataagtgtctggcatttcccctgcttgcactcactccatcctgccaccctgtgaagaaggtgtctgcttctcctttgctttctggcaagactgtaaatttcctgaggcctccccagcaatgcagaactgtgagtcaattaaacctctttctttataaattacgcagtcctgggtatttcttcttagcagcctgagaatggactagtacacatacttaatctccaaataaagaacatagcacggccataatttcataaaacatgatagagctattctgcacataactaaaaccacactaatctcttcccctaaagagcaggtaaagtgttgagtgatttttactcttctctttgacatcttataacttaaataatataacataaaattaacaacacaaatatatgaagtcaatacatcttatgttacataataagggaataagtgagggaggttaaattatattgttttcttatacacacaaacatatccgtaacaaaatatggaggaaatagtcctgacatttacagtcctcattttgataatggtcacatagttcgctatagctggtatttataactatcttcccctactatccattctgtattctctttgccttcagcaagcacttcagctgtggtgattctttacctgatggtataaaaccttcattcctgaaaagtcctgatatcagtgtcctcctttgattgggtgttataattttcttttgaccctaatcacaggacatggtaaaactaagagatgccttcagggatttgctgcatgcctaacatattcctccttactgccattgtggagaagtagttcaatttccccctgggtagtcaggaccaatcaccccacccaccacagtaattcagtaatttccctctttctgatgattcagatgcaggaggagcccaaagtgaccatgtagcattaacttccagttaaatgaaatcattgctgtttctcctggtagcaatgttccccactgcagaactaaaatctataggtcaggggaacataaggccatgaaaacaagaagaaaaactttctagtagctcactagaggatattagtgagcgatacctggcccatttccaccacttgattcctggactcatgaatcctggctatgggagaagtagtaccgcatactggaggctgattcagacaacacacagcctgctggggaatctttctccagtctcacaaggtattgccacctagctggcactgtaactgcgtattcaagaggtcattacatggttctatgcgtccagatgcttcaggatgatgaggaacagtgaattccatgagcatgggtaattgtcacacttcgtttattgggtagtgagttccttaatcagaaacaatgctttatggaatatcatggtggtggccaatgaattctgtaagcccaccgatgagtttttacagaagcattgcacgcatagaaagcaaatctgtatccaaaataagtgtctattccagaaagaaagtactggaaatagtgccctttctgtgatggaaagagtccaatgtaatcatcatgtcaccaggtagctggctgatcaacaaagggaatggtgccatattgggggctcattgttggtctctgttgctgacagattggacactcagcagtggtcatagccaggttggcctcggtgagttgaagcgcatgtcgttgaacccatgcataacctccattcctactaccatggctactttgtttatgagctcattaggcaatgacaggagtggacggggaaagaggctgacacatatgcagagaataagtcatcttattcacttgatcgttaaaattctactctgctgaggtaatccattggtgagcatccatataggacacaaatatctccacattatgtgattactcagagatatctattcacataccttttcctcaaatttctagttatgtttctcccaagtctgtgaccatccagggaaaccactggccacgtcccatgaattgacgtacagtcatacataaggccatttctccttccaaacaacgtgaacaaccaggtagattgctcacatttctgccccttggggggatattttttttctcctctattcttcaggaatgcctttgaagttgactgcagtgttctaattgtccatttggatgctgcattcatattgtgcagaaacatctgagaatgaatcccaattgctatgttttgaatgtttgtgccccctctgaaattcatgttgaaacttaatccctaatgcaacagtattcaaaagcggggtctttaggagatgatccgtctatgcaaactctgccctcatgaagagattcatgcccttataaaagaactagaagaaaccagctaggccttttctgtccttccaccatgtgagacacaggaacgaggagccatctcggaagcagagactgagccctcaccagacactgaagctgctggtgccttgatctcaatcttcaggcttccagaactgtgagaaacaaatttctattttttataaattgcccagtctcaggtactttttaacagcagcatggatggatttagacatcaaatcttctcttcccctgtcaactgatcctttggaagcttctcatgaggccataggtacaagctgggaaagagacagtaatatagcagcactgaggaccatggacattttctctacttctttgtgtaacttaacttgagccttcagggcctgtgtgggtccaattaggtatacaccactttcattagattatggagctctgctgtacacatccaaatttatggaatagtgagtcaaatactagctggttcttgatgggaagctcaggtcacctggtaacttactagcccatgttaagcacccagcctctacaaaggccaagtagcaggccaagaactgctacacacacacacacacacacacacacacacacacaaagagtagctaactacagaggacagcatggcaggatattgctccaaaatctaaagggcccgctctgtgattcacctttagggttcctgacaaaggctccaaataatgtctctatctgctgctatcacttcaagcacgttttgatctgttggagcatatgccctacatgacagagcagcttgcacagcagcctgaacttgttgtggaatcatcttttattttgagccccactcaaaattaatcgcttttgtatcactaggtaaatgggctggagcaagacaccaagtgagaaatgtgttgcctccaaaatccagtaaggtccacttttcttgtggtgcctcttctttagttgtagtcaggacaagatgaaacaaattatccctcactttagaagaaattcctcaatatgacccataccactgggcccctaggtaatgaaagtgggtaaaaccaccctctgacacacaaatgtcttaccaatatgtctagaatagacttagagttgctacttcttgttcactaagttcaatcagcattatgttaccaatgtcaaggaccaggatgataccttgtgcaagggaaattcagttgagatcactgcaaactaaattatgccatagggctgaagagttgatatgcctctgagataggacagtgaagaagtattgatggccatgccaactgaaagaaaactgcttcttacggtccttttgaaaagaatggactaaaaagcacttgccagatcaatagctacatatcaaatatcaggaaaagtgttaatttgctcaagcaatgaaataacatttggtatagcaactgctaatggagtcactaccttgttaagcttgccataatccactgtcattttccaaggttcatctatctcctgcacaggccaaatagtcatgcttaggaatgggaatgttgtgggaattgccacccctgcatttttctagttccttgtggtggcgctaatcttttaatactttaattgcttctgatttgttactttcctagatagagatttttctagtgtcttccacttggccactcctaccatagtagccttcacaccacaggtaagggaacaaatgttgggattctgtcatttgctaactatgcctattccacttatgccttccagaaccagggaaataaccataggctggggtcagggacatacttgtccctctatgggaagaatctgagctgaaacctttttagttacctgacttccataagcccctactctgactggtggacaacagtgatgtcttagatctcctgaaaataggatttgtccagaacaactacctagtagtgcaaaaagggtataattatatccgttttcttaatgcacagttatcctggtaaaaggtcatagatcactttggtgaaggctaggagaaaaaaaatagcaacacaaattttttacagtgtaccagagtctaatatgggttagatatttgtctcctccaaacctcatgttaaattttgatccccagtgttggaggtggagcataatgagaggtgtttgtgtcatgagggtgaatccttcataaatggcttcatgttctccttgtgataataaaggagttcttgctctgttacttcactcaagagctggttgttgaaaagaggctggccttcctcccttcactcttgctccttcttttgccatgtgacatgcctgcattccccttgtcttgcaccagaattgaaaacttcctgaggtccttaccagaaacaaatgctgttaccatgcttcttgtacagcctgcaaaactgtgagccaaataaaccacttttccttataaatcacttagcctcaagtattgcttgatagcaacacaaaacagaccaaaacagtgtcctttctcaaggggacttgatcttctattcatacaatgggtcttggaagtgtaaacatgtttagtctgggaatggattgagcagccgtgaccctctgttttatcattttggttagatttttattcgctgaactagaattgttttgctagaacaaaaattaagaacttattatttttcctgtctgtttcacttctagaaatgccacaatcaactaggcagtattaataaattcatcttgctccaacaccataggtctgagaaagtcaggttattctgattgctgctttgattctgctgtctattacaacaaccactcccatcttacttttagtggttgaatgccaccaatggtcccttgccaatatgccaggatcaaattactccagctgaattatgttttccagttcagtgaccaaagttcctactgtccacagctctcactgtaaggtctggcagacagaggagttacagagacctcttcaaggaagaaaggactccactcacaaatttatttctcacagccatggcaaaaggtatgtcttctgagtcttcccagactgggcaaatagactttttttattttttatttttttacttttattttaagtttgggggtgcaagtgcaggtttgtgacctaagtaaacttgagtcatggggttagttgtacagattatctcatcactcaggtattaaagctacaacccattagtgatttttcctgattctctccctccttccaccctccaccttttgaaagaccccagtatgtgttgttcccctctgtgtgtccatgtgttctcatcacttagctctcacttataagtgagaacatgcggtatatggttttctgttcctgtgttagttttctaggaataacagcctccaactccatgtccctacaaaggacataatctcattcttttttatggctgcagagtattccatggtatatatgtaccacattttctttatttagcctatctttgatgggcatttagggtgcttccatgtctttactattgtaaatagtgctgcagtgaacatacatgtgcatgtgtctttacattaaactgaaagcgacaaacccactttaatattccaatctctctaagcctgtgaatcccttactatacgttaaaccaaagcaagtatggtatttctaacttgttcactgtaggtcaccttttggttcagttttcaaccaactaaccaatcaaacaaactgttagagtcctttcaaattcaccccaatctgaaacagtgaatgcagattgtctgcttactgacttcagagcaataaattccataaataaagtccatatcaaattcatcctgctacaactttatgtgtcttctatcactatcccacacctttaatatcttttccacatatgtttcttgaatttttgtcaacataaattaggaaactcaagtaattcttttggagtatggcacatctccacttgggtcacactttgtttctcacctttaaggacctgatcagacatgagtctaattatagatctagaaggagaagggtagtgggatgggacttgaggaaaatcagcattgtcttgaatggcaactgcctctggaggggccgctaccatttctctggaaatcagattaatcctcacagatagaagtggagataccactctaactagggatgaaactcattagaatgtagtgctcctacttgtattcaacatagttctggaagtcctagccagacaaatcagtcaagagaaataaaagccatgtactttgaaaaaaaggaaatcaaactgtgcctctttgcagatgatgtgatcttatacctaggaaaacctaaagactccatcaataaattcttagatataataaataaatttagtaaagaatagaataaaaaatcaacatgcaaaaatcagtagcatttctatcaccaaataatggactagctgagaaagaagtcaagaaggcaacctcaattacaatagctataaaaataatacaatatctagaaataaattttactaaggaggtgaaagacctctataagaaaaactacaaaacactgatgaaataaattggagaaaacacagaacttggaaaggcatgccatgctcatgaattggaagaaataatattgttaaaatgaccatactgcccaaataatcatcagattcaatgcaattcttatcaaagtaccaatatcattttgaacataaatagaaaagataatccaaaaattcacatggaactaaaaaaagcccaaatagccaaaggaaaaaaatcagtatatcaaaaggatatctgtacctccatgtttatagtagcactattcacaatagcaaagatataaaattaactgcagtatctgttaatgcataggcaaagaaaagtggtatatatacacaattgaatactattcagccatataaaaaagaatgaaatcgtgtaattcttaacaacaggaatggaactgagagatcattgtgttaaatatcataagccagacacagaaagatacattttccatattctctctcactcatatgtggaagatgaaaaaagttgatctcatggaggtagagagtagaataacagataccagagactgagaagggtgtatgagtgggagtcggggataaggagaggttgattagtaggtacaaacatacagttagatagaaggaataagttctaatgttcggttgcagaatagggtgactacagttaacaaccatgtatcgtatttttcaaaataacttgaaaagagaacttgaaatgttcccaatacctaaaaatgataaatattgaaggtgacagctgccccaaataacctgacttgatcattctacagtctatgcatgtgatacaatatcacatgcaccccacaaatatgtacaaatattatgtatcaataaaaataattttaaaaataaattttaaaaagaattaggtgttcaacatctccagctccaacagggtcttatgatttccattcatctttgtaatctcattcttttccaatcagtgtcctcactttaacattccacactctgcaaggctgtgagtttaactaattttgttattcattcagtcatagaatgagattctgggttggtttcagtagtctcagccctgcaggtacaggaaatgaggacctccttcagggcataaatagaaatttacaggtaattcatgcagaacttgagttgagaatttgaatccttgtctcattttgttttcctactttgtcctgcaacattagaagcaaacagcaaatctcattatattcattagtttgacaaaaatgttcaaaagtatcacatacataataccccgggtccctgtttcttataagtggttgattaggagtattcaatggtgataattttgcatatcttttttcaaatcatgtcatattctatcagtgctgtctttactattggaaacagagtcatcagcatctttaaatctaatcagattaaagaggaaattctaaaaactagagacccaatttagaagactcatctttaaaattatgttcctttagaacctctcttggtaccaaaatctgcattcgggtttttaggtctttcagagaaatagaagcagttggcaagctggagaaacagtacaggcaatggtacagttacattccaaatgttagtatactcaagacctagaaagatccaacgtttcagttcgattctgaaagcaggaagaaaaataatcaatgttatagattgaagacagtcaaacaggaagagttctcacttattcacaggaaggtcagcctttttgtgatattcaggccttcaacagactggatgagcactccctgcctcccgccgccccaccccacattagggagggctatcttctttaactctatctgccaactcatgtgttaaacttattcagaaatgccctcgcagacatacacagaataatatttgatcaaatatctgaatacctcatggctctgtcaagttaatacacaaaataaaacatcacaacatcttatatgtactatgcattgtactaagcattaggcacactgatgtggatagaacacagttccttgtgttccaaaaggtcacactcactgggcagaaacagatatatgtatgattcagtatcatgaaagtcacaaagttctccttgagaatacattctctttggagggctagtggtatgcttcacagaacatgcagcatttgaaaatgaacaataagggacttgattgaaaatgatattaataccatgtgtcttatcttggcttctccaagagcagacccttagataagcattcaagtgcaagacgttaatttagaaagttccagaaacaccaatggtagagtaaggaagtgagacgaggaagatgaggaagccactgtagagtgaattactaaactactctgggcaattgaagcttaatcactgagggaatacagaaaaaagtgttgactatactcctcaagtttgttgtttctcaggagtaaagaagtgtattttgtatatcaacactcagtcattcattgagagctacttctatagtaagtgttaatctcttggtattcctgcctttccatgtgcaaagcagaggggactctggtggctagacaaagctcccaggcaaagagatgcaaggattaatatttgttactcagatttgcaaactgtgaaatggcaaagcctggggaatcgggaagaattcccaacagcattccttacaacaaagctgggtattaggattttgttcagtagatattggagttccattaaaggttgttgaatgtaggttaaacagaaagtaaaagatagcgaaggaaaaaattggcaccagtagctcagagacaacctgatatttcatttctctcacctttcacctatggccattcatttcacttttttttttttctatctcatgagcttttttttttttttttttttttttaccaacactatttggacactgaaaccatgatctcacctagatatttacttttgtttcacagttgtcattgaaagtccctgtacctagctgttagccattgtcctaacatgtttaactgtgaacttcagcaaggcccacattttaaatttcaagtcttgtctggaaccatattaggacctttataatttgagttcatacttcctttcttttgccacactagccacacgaaataaccttacataacccctccattccagccacactaatcttctcttcatttttcttactgtatatccattcatgccatagtgactttgtacatattcttctctttgcctgaaaattaggtctctggtttttcaaatagttatgtcttcaagtactcataacacacacacacacacacacacacacacacagagatgtatgtgtgtgcatgtatatattgattatataaaatacatatgtacatatataatatatattgcgtgtgtgtatatatataatatatattataaatatatatgcatattatgtggtacatgcaaaaaatacttgcttaatgaagagcacaggagaaaataacagctttcaaaagagagataatgagtccaggattacccctcttgatcttgaagggagtgtgtacataaagggagtatccacaaagaggtggacagcaagctttggtaagtggtgtttggtaccaggaggggagtggagagttgtagcagcatgcctttatttgaatctgattctgaaaaagaacacatgatttaaatacaagcacattagtcttctttccttctgccccccacacctttttcttctagaaaacatacaggattactcgcaagacaaataaaaccacatacgggctgggtgccgtggctcacacctgtaatcccagcactttggcaggccaaggcgggtggattgctttagtccagaagttagagaacagcctgagcaacatagtgaaaccctgtctctacaaaaaaaatacaaaaactagctgggcgtgctggcatgcccctgtagtcccagctactcagggggctgaggtgggagaattgcttgagcccaggaggcagaggttgcagttagtccactgcactccagcctgggtgacagggtgagaccctgtcacaaacaaacaaacaaaacaaaacaacaacaacaaaaaacacacaaaaactcacgtatggcaggacatcttcaaagtgtagtaattagaaagcaagtacgagatcttaaaattcaaactatagaaagactctttacttgcccctctggattcttccatattcaagcaggaccagtttgaaaaagcaataaagattctaccttcctttttttcccccttcatttccattgacattccacatggatcttgctcttaaatccctgcttactcataagtcataggtcaaatttttggggggtaacctaagtgtatgcatttctgtaattatggaagattcacatggaatggtttccctataaatcagagtaaccatgtcaggcaatcttgaagaaaagtgctattgtatgattaataaattgcttatgcacatgtctactatcttatgaaccagaatgagattcaacatttcttaaaaggaagctttttgaattttatgtcttgtctcacagaagtagcctttctttcttcagcaacacagccaccaccgagcttcacaatgagcaaaccacacaccaattttcttatgttcttataagtcatgccagaaacagaatccatatccagtcatttagtacagttgttagttttatctatctgatttggatgtatccacatttcaagttaaagaaactgccttctaggtcaaaatgtgctggcatgtaaatgtgctgaaccaaacatatgattttcagagacaaatataaataacagtacatgtatttttgttgctcttatggccagcgaagaactctggtcttagaaaactacctagatcacagattccagcatgaaaagacatctggaaactgatgggacacactctgaagaggaacaataaattatttagcctaaccaacagcaacgtccccagaagcaaaactatacagaaatagacttctccactggaaggacatatggaaatcaggaatcaaggcaggaggtgcctctgatgaaaaggatgtgggagtcttcggctcactgataactgtgagaagatgtcataaagatggttttataggaaaaagaaccattctctgtttccgccacagccatgagggccggtcatttggcttgaatttcaaaggctacacacaattctttagaaatgcagggagaaactttgctaaataagggtcaagtatgctcagtcagaatgcatgtgtagtatcaggagcaaatgttggaagctactttatcctatcacataagaatgatgaaactattaagaatatctctgtttgaatgcagttatagtctcttaatgtaagaattttcacacggcatatgttactcaatggtttatcagtttcaacacttttccagcaaggatgaactttttcttctattttattataagggaagcaaacttttaaaaaatatttagttttttgcacaattttcatccccaaggaacaaaaatctaaaaaaaacaatcctaaacaaaaatctttcagtgatttttgcttaggactacaatattgattactgagtaactagatgaacactagtgtagttttcatacctcttacattttaaaaaagctaatgaacatttcataccactgtcagatagtctatctgcataagcagctattccacttactagtagtttaaagtttttaatccactagcaacataagataatggtattcttgatttaaaatgtaataaaaatatagcaccctcatactctgctttcattacttgtgaatatctaatccaccaaatattttgagatttccagtgtgtgaacactcaaaaccagcttagtggctacccctgagcttcccaaccaatgcagcaaaccaatcaatttgacttgtattgtttcctgaattgaccagttatttgtttgacatcattggacaactaaggtaaaatgcagcaaaccaatcaatttgacttgtattgtttcctgaattgaccatttgtttgacatcattggacaactaaggtaaaagttgaattactgtgcatataacataaaatctgggtgtgcactggcagcttatataccacgttccccaacaatctgacacttacttttattgccccaatttggatcatttccatttcatttctgctttaggtgaagggactgtattgacacagaagttcacatttagtatcttacattcactgagtatccacaatgtcctaggcattttgctggatctgtgaggtggtgaactaaaagcaaccaggaccacacactcatttctaaagaattctctctctcagccatccctgtcttttggccatcctctgcttcacgacagaagaattgttcttcttatttgagtatacaaccctggtcttccttagtcacttactggtcagactgttcccctgcagaaccagcccctgctaaattgatatgatctgcagcactgtaaaatccaatgtcccacttgctcctttgctgcacatcatgccccctagcctgacaatgaggaaccataagctgcagaaaagctgctttcctgacagacattagaaggggatatttgtgtgtagttcaataaatgccatcttttcacaccaatattttaattattgcctttgtaaatattatggaggttatgctgtcatcaatggcaccatagagccatagagagacatctgggaaatgctgagcagaaagagctcctaagaatcagttccttcttctcccttattttttcatgcaaagaactcagttacccagttgttaagtgtctttgttcacatagtgcttacttgggtatctaaaatgagtgaaaaaagaagagataaaatctaagcataacttatatctgaagtctaattcattattataaaaatgcaagtttaattacagtgataaattattattattctaaagggtcatgtctccttatattccttcaattactttacttagaaaaataactataatttcttctttcaaataccaaaattaacaaaaatactactaattatctgggaaccaggaagaaaagagactagagcacactcacccatgagcacgtgcggttaacatatttttagcatttataaggaagcaagttttttttcttggacaaaagagtctgtatgatataatctgtttccactttttgagtaaaaatattcagttttaaacacttttaccttcttcctatttctaaaattgtcctaaggcaatgtgatttttgtaaaatggcctaatggctgaaaatcatttactgccaatgcctaatttgaaacctgatgttctagagaaatgtgtggccttaaccatgccagaatgtctcattttatgtttaaatggtcacagatttaataatgggctgcaaaataaaagattgcatttaactacatcctttacttttcaagcactcatccaagtatgcacaaacacaagggcatgccatacgctttcaatccataagcatcatgggaaaggcccactctaggctctgtacacattaacaaattatgtcccattgggtcaatgcaaaaattaattgtgggattcttttcaaatccacattgtttcctggccctgttgcaggccactcaattagacacgtctcaaggcctttgtgctggactaaacacagctaattgttccatttctgcatggagtgattcatctcccagatatctcagacctttcagcagctctgcttcaccaatatctggacatatgaaaacagaggcatttgggatttgggcagaggggaaagattgggaagcaaatagagcagggtattctttacccctgccctttggtatgattaatcttcagtgagaaaggactcctgaatcattctcttgacaggacagcccccttgccctatctggctccccatgtgaggagcgatggatgaatgcttccttttttcccttcctccaggtgcaggcctattcacacttgagcctgacagcacataatagaacagtttctacttgcccattgcctcggttctctgtattctctccccaatgtttctcatttgtccacatcctagtgacagagccagtcaaactgaaaatacatgaaaacccaaaggcagtcatttattttcttgaagcactgatgtgtgtgcatgcatgtgtgtgcatgcatgtgtgtgtgttcttacaagaagcatatcttcagagtaaatctatggagaaagattcttatatctcttacatatgtaaactactgggttagcttgagtgtttgactttgactttgactttgaatttttgctttggcttggcattttctcttcaactctctcctttacccagagaaaatagtgttattcattcattgtaacaattgagtatataataatggatgttttgaaatagagagaggtgtccagaccctctatctttgtggtaccaatcacatgtaaaggaaccaataatttattatgatttagtttcaaattgaacacaggaagacaaaaatcttctgatttaaaatgagatgaaaaattggtacctacaaaaatgttttaactttatatgcatccatgtatagatttaggttgttccctactcaaaataattaagctaaacattggtctcagtttgagatttctgaaaacagacatttagactggggtgtgagtatatagagtttaatttggaagtgattgcagaaagagagttaggaataattcaatgaagagaagaaagtcaaaatatataaaggatatattatcaaacaagttaccactgtgggcagctgcagctcaatcccaatggggaacttcaagaagctgtagaaaacatgcaactcaagagttgttccctctgtggagcaagaaatctggaatatttatacactaacatccgtcagtcaataggtgaggactactctcaagaaatgtaattaaaccagtgtacccaagcaatatagactctcatcatcaaacagtgtttaggcaaattgatggagatgcagctgttgaaggactgctggggagcactaggatggcagggcaccagcaatgtctgctccaccattgcactttctggaacttcaacaagaacgatcactggttttaagctaacctttgaaaccctgcactgatgtagcatctgtgggaatccctggctttgaaatataaggcgtacttgacttttaattttctcatattcatgtttctgactgcctttctgtgtcctttcttaactagacttcagatatctgcatggctaatcagcctgagatcataactctagcagaacctagttgtctgttgattatcgaaagtttggtgcaagtatttttttcccaaaccatttgagagtaaaatgctaacctgattcccccacactttcaaatattttagtgtattttatacaaacaaggacattctcttaaccatgtatcataatcacaacatatccatcaaatcaggaaattaacattgatgcatttctatcatctaatcctgagatcccatctgagttttacaacttgtctcagtaacaaactttatagcaagataattcatttcagaattacacgttgcattgtgattgtcatatttctttaatctttttcaatctgtacaagtttctcaatcatttttttttaaacttttttaaaccttgacacttatgttgtagaatgccctttaatttgggtttagatttgtcctgtttatcctcatgatgatatttaagtcaaatattcctggcagaaatatcacagagctaatactgtattctgctcattacttcataatcaatggataattttgatttatctcattactggtaatgttaaccttgatcatttggttgaagtggtctctggcagcctttcccactgtcaggttactattttcacttttgcaattaagaaatattttgagaggaaatacttcgagcctatgtaaataactcaccagtcataaaactttcaattatttatcagtgtatgtatttatacacatcagggtattctcatggattcctgcttgattcattgattcattgtctttactatcttatatattctgatggtcaacttgtctcagctttggccggtaggaaccccttgtggctagcttgttcattcttttgacatatccctatgtctttgagcactccctaggaagactttaacattgagcagctcaccaaataatattccactatgataaagcaaaaaatagtgttcaccctatctccattgccaccaagaagagcacagtgaggagaaaacccaaatataagacatgagtggtttgattgagccaaaagacagcttctgtcatagcgctacacattggcatggaaatctcccacattgaacatcttgaagcagtgaatagattctaatctttctggagttacttagatgtggaatttgctttgactactttgaatcaaagatcccaagatattatatcaatagcttgtaaattgtgatttaagctgcaaactaatattttttcttataaacaaccaactttggaaaaataaaaaaagaataaattaattgtatcaacatttatatcttcaaaatagtctgctagggagaaggatctcattgtatttggactggcagacccagggataccaaaacccgttcctgtttatgatttactttccaagggatcttgaggttaccaacagaagtaagtgcacattggtcaaaagccaatggaaaacaagagcatgttttcatcaactcagtgcttaagacctaccagcaaaaaggtttgacaaaactgaatctccctctttcacctctaatcccaagtcttaacagttaccagttggtcacatggtacaagcagtggtcagcacaatgtgagcataaagagagtaaagaaagcaagcttcctgggcgtcaacagctattgctcctttcacgtggagtgagtgagaaaagaaacagagttcctacttaacccttggccaccctgccattcataactgggtccaggtgaatgtcctgagctcagcattatgattagcaaatctttctcatcctcttgggaggagacggtagtaatgaactgagaggtagacacagagttctttctttcctacatatttattgtaataggatctaaaggcattctcagcatggctcattcaaggatcctgcctttaatggaggaaaattagttccacaaataaaacacaaaatagaaagtgtgaaattatatgtaaaatgcacagaaataggcaaatgataatgtattaatggatttctttaaaacattatttgaatttaaagagtttaaggcgtgagatttttttcatactgagcttccctacatgtagagttggaaggttgtctcaggtcattacacaaaatccaattctaaacaggtgcttagggtcacgggttcagttcattcactgaacgtacttcctttggactcagtcaactaaacccaatgcaggagagaacttaataaaagaaaggaaaccctaccagggcttgctacaaggatctcagggttttaaatctattgtttggtctccgtatgccttcaggttaaccatatgtaaacaattgctacttttaacaccagaagcaggttacctttcagaggtggacttattccttggccataaagtttataagtctaccagctaagtttatgaagtgctcaggcatcttttggaaatgaaatgtgctgggtagtggcaagggctctaaggtgagaaggaaaggaaactcagccaaggaacctaagtctcattagctcatacatggctattgcaatgaaattatacacattctaagagaattaagactgatttgcagcactgaaatgcccgtgagctggttaaagcatacagccattacctgctctgcttctgaaggttactaagcataggaaagcccaaagaaaggctggatgaagtaaaaacaagtcctttttgactgtaatgagtcttgttcctgctgtagacttcaggcaatccctcagtggatggtttttcccttgaggttagtgggggttctatcaagacttggaggatttgaatcaaatttcctcatttttcagcattttgatcagagtttttactttctctgagtgtgattatgtctgcattaactccagaatgaagtaagactttcctttttttagtcacctgtcctactggaagcttctattccctttaaaggagaatcggatactactttctttcgaggtagggaagttagttttgctacataatatattacacacaaatggctgactcaaatttaaacattttaattttcttaggacactgggttatagactcaatatgccccgtctcagcccaaaaattcaagtgttgaagattaatcctaatttttatggtatttggaggaaggcttttgggaggtgattaggtcataagagtggagccctcccagatagaattagtgcccttataaaagagatctcagagaggtcactcacccctcccaccatgtgagtacccagacaatgagaagacaattgtctatggaccaggaaatgggtcctcaccagacaagaaatctgctgtcactgtgaccttagactttgtagcctacagaactgtgataaataaatatttgttgattaatccacccaatctataatatttttgttacagcagccagaacagactgagacatactgtaagttggcactttgggctgggcttatgtaggattgcttatctctgctccataaggtgttgttagagtgtatccatttgtttgttgtcagttggtggctgaaggtttcatttatatgctttgtggttggatagctggctatagggacaaggcagtaactggaccatatatggctcattgtctagcagactagctgatgctcatttttgtggtggtagtcagagttcctcagagttggaagagaaaagcagctccagtattcaagcacatttccagcctctgcttacatcagattttctaatgtcccactggccaacactatatcacatgactaaatctagattaaaaaataaagaaataaactccactccttgatgggatgaactgcaaagtctcattgaaaaaaaaaacgcatagattcaggaagagaaagcatttgtgctctgttttgcaattaaccatatgaggcaaaaaaatgaaaagaaagctgaatacattcctgctgtaagtgcattcagttctgcttattgaggagaaagtgttgagtctttcatagtgtgatatttttatttaaaatttccctttcacagtatgtgcacattaatgaagtacagttatttccagaaaaatatgcttattataccccttaaaataaaataaaaataaaaataaagaaaataaaataaaaaggtaaataaaacaatttcaactagatttttttctcctttttttcttcctttcagactttcctataaagcaaaatgaaacatgtggtgaacctattcacactttctcacatttagtaaataacttcatacatttatttttctttgtaaagtaaaattatattcattccaattctgccacttaccagctgtgtggctttggcaagttacttaaaccatttatgcctcagtttccttatcattaaaatgggaataataaaagttcctccctcaaaagttataataagaattaaaagagttattacttttaagtatgttaaacagtgcctgaaatacagctatggttaaaccactgttgtataagtgtttgttaaccaaaaacaaaatttggggtttattatgaccatgttacccaaggctacagtcataaccaagactatctcaattttagggacaaatttattttcatttatgaaaataatttaggcagactgtaccatcatttgcccattcttagtttttcattgttaacatgggggcaatgttgtttagatataacaacagtaataatatcagctcccccaccttggagaatgtcttcttacatttaaagcacttttccacatattttatttgattcttgcagtgggacatgaggagatttacaacagcagtatttgaggtatgtttcaaaatacccgccttagcgcagaacgaactgagagggaaagcaaagggaaaggaaagaattaatttttcatcttttggggacctaatagccatgctccttggaaaactgccagcatgtttttcaggaagtctgaaaacagcagcttcacttgtgaaaatcaggaggaaggcacaataatcggaaacaatcacacttcagataaaattcatgacttatgagataagcattataaaaagaaggaaattaccgcaaattttttatgaccataaaaagcccacattgggagtagctaaattaaatttatattagcaaaaaaaggtgtcctcgatactttctaattgatacattctagttgagaatttcagacctctgatagatttcaccaattttcattaggatgctttcagcagcaaataacagaataccatagtacaaaggagcttcacaatagaaggttatttttactgcacacagaaaactctgtaggaagacacttgtcagctttcctgtaactcttggccttttccccagttgtcaaatggctgccgtaagtttaagcctcactccacacggaaagaacttccacatgcagaaagggagataagaatacacttcacacatctcatcctcttgacagagacagcacttttccctgagccaccagatttctcttctcatgtctcattggccaagagtgatcacatgttcacacaatgtccgcaaaggaggtggggaaagcaagtgtctattatctttagcttttactagggtagaatgaagggaagggatgacagaagtagaagttttctcatgggcaagaaggtaggaggagggagaagttgttagtaactcacactgcctgtcccaaacagtatgttgaggaagatattttgatctcaaacattttatatatgagtcttctcatatctcccacactgctgtaacacccacattcatacagcgaacaactttaatgatattttatgaataactaagtctgaattgggacaaacataagtggatctatgcaggtttaatgaagttctgaggaccacttcatcagtgataatgaataacataatgaaagatatcagcctaggatcccatggcttagcttaatataccaccaggaaatagcttccattcttatttaaacacacgtatgttttgatatacatgcctatgtgtctttatatgtatttctactcaattgaaagaattgcaactgccagtattttattttactatcattttaaacttcatattaaagcaaaccccttttaacgttgttcagatgtaataagacgtagtgtagtgatctttaaaatagtgtttgtggtactctaagattcgttgaagccagtggatggagtggagtggaggcagccattgtcatctatttgatttggaactaagataattccacttaaaaatctatttgtaaaatgaattctatgggtaagaaaaactctttagtggaaagagtttataatttggagttagaatgtgatttgattctaaaactgccatttactagcatgccagggaactatggatgagttagaactcattcccccataatggtattttaatgttgtagaacccatgaattttgggagataagagggtttgcaaagtcacctgagctctctaggtacaaattaagtgcccaggaactatcaattctttccttattcacaggtttcctgttttaatcatagcaaagtgccccattaagtttgtattccctaattttattagccaaagaaagttgtttcaaatgctttgttataacaactatcattcatggagaagatttttgatttactgtaatttcccgtggaataaattctaggaaatgaacttatggatatgaggatataaatatctgtttgctactccagaaattttgccaggttttattttctattataaaattataatgatttatgctgccacttgcaatatatcattgtatcattgtaccaggtttttaaaaccttgccaatttcagatatttcttcacttatttttggcaagtagcaaatatgtaaagtgtgaaataatatcaggtagttgttaaatttgtaatggctttattactagggagggtacacatttttcattatttttaagaatgactattgtttctgtaaaaatgaggcaatggtcattataaaaaatggaagcaattaataaacttatgaagaagaaatgaataatccaaatcccaccatctatatttcatttcaaaattaagtaaatattttccagaaatctcaacctctctctcttcctcttttcctccttttccttctccctcacacatatcttcacatgaaatgttaatgaggatagataaaaatatctagagacaaagacattatacaaattgaattatataactactttgtatgactaaaagtatagttcttgatgaatggaattagtagaataaaaaaccaaataaaacaatactttcctattttatctttaatttagaaaagataagtttttcaccattgatatttttacaggtagtttctaaatgattcctccaaaattaagtcaaaatattcttagaattatcatttttatttcaaaatctacacactttactactcatctttgtctttatacataattttaagttttaaaggtttcaaatacacgtgtacctatacccatgtaatgttaacatgttgctttattacttcagatcatttttaaaagaagttaaataatacaaatagagcatttgaatcacttttctttccttcttgtctcactacgtggaggaaacttattttgaaatgagtggttttcgattttcatacaaatggcaattttactacacatgtaaagccataaataatataccattgttttatgtgtgtatcgacactgttttatgtcccggccagatctttttcacttctggtgcagctacactccatctgccgctcatgttggctcctcctggttctaggtctcctgctgtctgtggaagccctttcactgacaggatgcctcccacaagtcagcacacattaataattgactggcaaaggtttgtgtagaggatgggagatgggtcaacaaggttagcccctttccttcaagatgagaccagtgctatggttcagttcatcctccagagctctttcgaggatcaaactgacacaagaattcagccaagaccacaacaaccttactccactccttcccttaccttttcaaccttgctttcctccctccccttgttctgagagccaccttccaataaatcatataaactcaaatctctgtctctaacatgcttttagagaaaccgctcaaagaaaatgtgatttctaaatttacaattattgtatcaattgtgctatactttattgagcattattggcaccttgctttctccacttaaccttgctttctccaggtaattttgagagatttgtcattcttgatatttgaggctagagtctatacctttcgtctaaatactaattattctattttaaaagagttcattcctccattctcctaagagacggttaaatgcgtgttctatttttttcagtattgcaagcactgaacaattccatatatgttcctctgcatatgcattacaatgggtacatggatctccatttttcttcaatattgccagtctacctagaaagtgggagtacccattaagactccaaccagttgttaattagcattcctatcttgcatcatttttgccaacacttcaggatgtcaaatttattattattacacttattgttgttgctagttttaaagggtttgcagtggtaagctattgttttgatttctgtaatatttctttttttttacatacattttctttttttctttttttattttattactattatactttaagttttagggtacatgtgcacaatgtgcaggttagttacatatgtatacatgtgccatgctggtgtgctgcacccattaactcgtcatttggcattaggtatatctcctaaagctatccctcccccctccccccaccccacaacagtccccagagtgtgatgttccccttcctgtgtccatgtgttctcactgttcaattcccacctatgagtgagaatatgctgtgtttgcttttttgttcttgcgatagtttactgagaatgatgatttccaatttcatccatgtccctacaaaggacatgaactcatcattttttatggccgcatagtattccatggtgtattactagtaatgccgtgttttttttaatacatgaattggcagcttagagtttctctttgctaaaatgtctgttatagactttgtttatttctctcttcttatgtatagatttcttgttaatttgctcacttcatatattttggataataatatatttatttacaattatatttgtgtttacacttacattcatacaatttcttctggttgataaataagctgactatcttctgttttccttctggatctactctccatctttctctacactgctttctacctgagagactgaccttgttgtggctgatctgtatggatgtattttcctgtctagttgggccaataggaccagtatcaagagatagggagaaaagagggaagtgagagtatgtattttggctccctctttgtgtagttgtcgtcatctggctgcatctttttaatgaaaagccattgttcctgttaggcattcttcttcacgaaatgaaaacacctcgtcccgccttaacttgcttgacaactagaatgtggcagaatgatggtgtgcaactcttcagtgtaaacagaagtttccatatatgtaggatggcatggagaaacaaagtttggaaagcagcaggaatattggagaaaaataaaatcactaaatatcttagctgaagcacaaaactgggaagtccccacaaatccaccaggaataactacaattctcagaagtctctggcaaagctctcacctactctctaagcctgcaccatcaaagagagtgttcctaagaaggctaaagctgatgaaaattaacatctctttgcctgaagaacatcctgagaaatgttcccagcagctctcctgaaattggtagatgatatttgacaagggaaatattagtttgttgttttatgagattgtaatacatacgtataaaatatgtaaaattacatatatatgtagacatatatatatgagattgattgatatagtgattgatggagtctccctgtgttgccaaggctggtctcgaactcctgtgctcaagcaatcttcttgtctcaggctcccaaaatgctggaattacaggcatgagagtgtatgtttaacttaaaaagatcatctcagaaattgacagtgcagactgtcacagttggcaaactgtttttcttctgagcctaacagtgaatattttaggttttgaggactgtggtttcagtggctgctcctctttacaccattctcattctttttaacaactctttaaaactggaaaacccaatcttagttctaatgctgtacaacactagttacaggcctttgactgtgcccatcattttttaaatatacctttggctattagatattaccatatgacttttaagatcagatatctgtctctgcaaaaaaaaaaaaaaaaaaaaaaaaagatagtagaaattttgatgggaactacactgaatccagagctcaattatatcttctttaatttatttcctgagcatgcacacagcgttacacatctgagtggccttctaggttcccaggaatacatcaaagctttggaatgccccatggacatctcattcctcagcttttccttttgagcttgtttattagtctatgagttttgtaccaaatgttattaattgtttcaggcagccatgacattaaaaccatttgcctgtaaaggtttttttgacaaacagtcactcaagaggggcttttagcaccaaatgaacactgagtcaggtaatataaagacaacggttacacatggttaattttgatagatgttgccagattgctgatccaaaattctataaaatttacatttctaccaatagtgggtattacttgtaatggtgacagtttgatgggtgcagagatacgtctctccactgctttatgtcccatctagctacaatgctcatgtctaagatattctcataatttgtttcttcacctccttcaggtgttcaactgtttcatcagttaatcttcactaatcctgctacattgaaaatttaatgcataacaggcaatgaaatattttcaaatgaaacaattatttttaaactttttaatttttgtcaaatttaaacatgcatatggtttaaattttcagaaatatttgtaggacttataatgataaatgtcaatctcccatttcactcttcttaccacctaattctcccttttcagatgtaaccacttttaatgcatttaattttttctactgacatgtctctttaccaaaggatagtaatgtacttctatttattgagaactttttctttttatgcattgcctactatagaattctacatctcttcacacacaaacatacacaattccttttttctcattatgtcaaatactaatatataataattttatttagtcaaatattatatgataataattataaccacattgtttacaactcattttttataatttataattttttagaaataaaattatttgggtttttgtcacgaattctatgtaatccatctctgagttatttgacaaaattatatttcttctcttgatactttaaaacccaataatgtaacttgtaacttgttttttcttttcttttttttttttttcactcttctcttttgtccacttgtttcaatctgggctggttcctttctaaacttctgtaacgctatcatccccaaatcttcttttattatcgaatcggaatttttttcaactctcctggaagtactgtctccttcctggatattgtatgtttttattttgatttttttaaagaccaaccctcttgttctgttggggcatattctgcagtatttatttgagaaaaaaagcataaaaggacaattgttataaaattgcacttttataaatgtttttatactatttgcataaacgatggaaagtttgctgggcatagatttctcagttgagagacattttctctcaaatgctaatgctaaaggcatcactcattattttataacttccaattgttgcttagatgacagatacaattatcattttagatgctttaatatgaataatttctctctccctttctcttctcttctctctctctccttttaaaatcttatctttgcttccaagttacaaaattttataataatatttcttaatttttttcaacctatggttttgggaataattatcaaggcaaaaatcatttactagtaaatcaaacggggatccagttgccaaaacagagatgaggtagattaattgcaaaaattatttttttttcctgatatatttctccctgtaatatgactataaagtcattgttatcaagaggtgacatttatttcctcacctcttgaatgcagaggacttggtttgaccaacagaatgtagcataaagacttgcatgtcctcaactctctctcagaacccagccaagtcacactgggaataacgccaggtaaacctattggagactgaggtgtgtcatggagcagagatgagccattctctctgagaaaagcctagacaaaccaacactgtagctgacacagctcacctggaaccagctaggtgacagagactcttgagatatcaaaatgcttaatgcttaagccactaagtcttgggggtcattgactttgcaatatcaaacatatacatatagaatatggtaaaaattatttcagaaacaagacccaatcattcaacttgaaaaatgaggccacattttaattataggcatggctgtgaatctgattaccactttggacaacagattttacagtcacttttgcccttggagctgagtctgcaagctgtaggacacagaagtacacacttagaaaacagaatatgagagactctcccagctattccactccttaaagcttaaagtgcaaccctacccattgccactctaatgctaaacaagatgacttcaatactgggatcaaaactgtcagtcaaacactctaccccaagaatttagtgctcacagctacaagaactcaaaaataatccaaatcataagtttgaaataggcataggtataggcacatctaatagttttcagtaataatcccatctcaacaatagatattctatctttcatccaagaacagttaaactgtgcaccctaggcatactgaactctatttcaaaggaggtggagtcttgcccccttctcttgacccatggaggctcatctagtctagtaaaattttccccacctggatttccctattaataaacatgagaatgttattgggagcaggggtggcagaaggtgtttgccacctctgcactatcatggacatgttgccaacatccatctgggattctagaagacaagtttgataagtaactggagaagattggtaagtgaatctattgtgtgtgagctggcacctgcttatcatttattatttataatttataaatatcagatcagtttggttagctatttttttaaattatggttatagtcatatgcaatatcacagttaagaaatatatgcatttttagctgaacacttgtctctcctttgcccatattataaaagaaaattgtctctcaataacaataaataggccaggcatggtggctaatgcctgtaatttgcactttgggaggcctaggcagatggatcacctaaggtcaggcattcgagaccagcctggccatcatggtgaaaccccatctctactaaatatacaaaaatttagccaggcgtggtggccggagcctgtaattccagctactctggaggctgaggcaggaaaattccttgaaccggggaggtggcagttgcagtgagccgagatcgcgccattgcactccagcctgagcgacaagggcaaaactccaaccacccttcgacccaaaaaaaaaaaaaaaaaaaaaaaaaaaaaaaagaaaaccaaataaatatcaaagttcaagatgctcacattgaatagctaacattatcttagatgttttccttttttaatagaggcatttaatttttttcctctcaaatgtactcataaactatacttaacgcacttttacatttacacaaacatcatgtcttatgtgttagcaggccagaaatctatgagaatattccctctcttgttgtcataccaaattcagtataaattaattttctgaagatcttgcaaatgtctcatttaacttggtttcagactaaatgtgcttaatataaatgtacacaagtggtcattctctattgggagattcattgagccaagatgttattttggaaggatctttgagctttaagtgattctctcaaaaagtatgctacatattacctgctctggttagctgccaaatagccagcaattttaaatgactacttttcaaagcaaattattcacaccttcctactcatcagaaagtctcagctgaactaacattttaaaagacttctcaattcataattcttaaggaacaacattgaattttcttcccactcttcatttttgctgtaacactttggctacttttaccacgtcactgtaatatgctaccaaaataaagttctaagttggtgacatgagatcaattctggtattcatcactgttattctctattgctccatccattacaaatcatagaatgttaaataatcattttttttctttttgcctatcttattttggcaagatgttttagtctgtcaagaaaaaaatgaaagccatgtgttttgagtgggttccattgcagcatgattcttgcaatgaagacattttattgtgttaattttcattaaataaaaccctgttgaaagccagtcgttttccaaaacccatatgatttatggcatgttaatttttgtagggagacactctgtttcaattatatggagtaagtgatgcctttcagaacaacttagtaataatatcacctatgacaactttaattttagacctatacctcagctgtgagacttgggaacgtatcaacagaattgtcagcttctgcacaaatttaatcttcatcacctctatgctatgtttaacgtcagatggttgtgcttgccagggacttccaataatgtgcttccagaaggcaggcacttcataaacattaaacactgggtttgccataactcaaacatattatatttttttcttttacaaccaacagaatgagaagtgctaaggccctaaggcaaatgtgggtgcacctgaaggaaatgggctatttcatatagtctttccttactctatcttttttgtatttggtttactaatcacatacttaatgacttatctttttctgaagaccttgagtctaagtaaaatatattaagtgaaatcaatatatttttattatttttatggaaaaaatatgcatcaatttcaaccccaagacatgaataaatttataacagatgaaaatgtatcaaataaccaataataacaaatttacataggtaataaacagtaatttgaaagtgcataaatagtgtgtacataaaatataatgaagtaaaatttattgtacttaatatggtacaatgaagcaggtggtggttgttgaaggatgggtttcagggagtcatatttttttggaagatctattccttctgcactattttttcactaatatttgaacttctatgaggcttataattttcttacattcaaactgaaatttaaaatgaagttaaagcacagaagaacatcttcagtcaaattaattgctaaacattaaagggctcaaacacatgtaaataggacatccacacaacagccggaaaagttgtggaagattatacctttccattgcttcctccagttataaacatgtaaggaaaatcccttagccctcatacaaacgtggcattctattccaacgtactccatatggtgtcctctgaccattgtgtcaagtgagtaagtgtgattttgcctgaaaccacaatgttgaaatacaatttttaaagagccatgaaaagtcattacctgagcaacccttattgagttaagtctgtttagagagaacattctgtccttggcttttgtggttatgcagtacaaatgattcttctgcttctcttctgattgatattgtacccagatgatgaatgctcagggaaaagtgatgagctaaagcatttagaaaacaaaattctctgtctgcatggagaaattggagattccattaaacattttcagtatccagtagaattgctttgctcctaaattatgctattgccatgagaggactattaactagaacaaatttgtcactcagcatgtatgatgatttctgatcctgtgtacaaaatgcggaatattaatttcccgaaaaagcctatttgtagtgatcaaagggctataaacaagtgatcccaagaaatgataatttaatcctatgttaatcaaatgattagaatagtgacttcttttaaaatttggatgtcattcgtgtcttagaaaatcatcaggattttagcttagtattattattattatttagtgaagtttgttgagaagaataagaaaatggcatctggaattatagctgtatatatctgcaaccctacttgttaaggtgacagaggctcaaagtgcaggaagcagataactcatacatacctttaggaatttcactttttaatacccaaataaaataaatgagccctatgtatctcgaaaagaaaatagagcccgtccttggagaatcgacttaaaataactgatatggtttggatttatattcctgatcaaatctcacgtagaattgtaatccccaatgttggaggaggggcttagtgagaggtgattggactatggaggcggacttctcccctgctgctcccatgatcatgagttctcacgagttctggttgtttaaaagtgtgtagcacctcccccttcactgtcttcctcctgctctgtccaggaggaagaagtgcctccttcctctttgctttctgcctgaattgtaactttcctgaggcctctccagcctgcttcctttccagcctgaggtactgtaagtcaattaaacctcttttctttataaattacccagtttcaagtagttccttataacagtgtgagaatggactaacacaataaccttttaataatatcctgaaaaagagttcagaaaattccatatggaatttttctgtctacatcccattcagaaaaaataaaatcactaaacatccttctttttcttttgattttcataaaaacaactagttttgtttggtaaaaggatagtcattttttgtgctttttatatttttatttttatttttaaaataactttaccttttattttagatttagggggtaccatgtgcaggtttgttacgtgggtatattgtatgatgctgaggtttggagtgcaaacaatcttgtcacacagatagtaagcatagtacccaatagttagttttttaaccctttctccccttcgtctttcttccctccagttgtccccaatatctatcattgccacctttttttttccaggaggacccaatgtttaattcctgcttgtaagtgagaacatgcagtatttgcttttctattcctgcatgaattcagttaggataatgacctccagctgcaaccatgttgctgcaaagtacatgatttcatttttctttagactgtctagtattccatggtgtatatgtaccacattttcattaaccaatccagcatttggtgggcatctagtttgatttcaagtctttgctattgtgaatgaatatatgagtgcatgtgtctttttggctgaacaatttattttcttgtggatatatgcccaataatggaacttctgggttgaatgataggtcacgttctctaaagaatctccaaactgctttccacagtggctgaattaatttacattctcaccaactgtgtataagtgttctcctttctctgaaacctcaccagcatttgttattttttttttgactctttaataatagccatctaactggtgtgagatggtatctcatcgtggttttcatttgcatttctctgatgtttagcgatgtggaacatttttaaatatgtttcttgtctacttatatatattcttttgaaagttatctgttcctgccttttcctcattttttaatggggtaatttgttttttgcttgttgaattgttttagttccttatagattctggatattagacctttgtcagatgcatagttttaaaatattttctcccattctgaaagttgcctgttttctctgttgatagtttcttctgctgtgcagaaactctttagcttaattaggacccacctgtcaatttttgtttttgttgcaattgagtttgaggacttagtcataaattctttcccaaggctgatgtccagaattatgtttcctaggttttcttctaggattcttttatttgaggatttacatttgaatctttaatccctcgagttaatttttgaatatggcgaaaagtaagagtacaattttattcttctgcatatggctaatcagctattccagtatcacttattaaataggcagtactttccccattttttttgtccactttgtcaaagatcagatgactgtcagtgtgcagctttatttctgggttctctgttctgatccattggtctgtgtgtctgtttttgtaccagtactatgctattttggtttctgtagccttatagtagagttttaagttggttaaatgtgatcccttcagctttgctctttttgcttacgattgctttggctatccgtgctcttttttgactcatattttagaatagttttttcctagttctgtcaaaaatgactttgatagtttgatacaaatagcattgaaattgcagattgctttcagccttatggccatgttaataatttttattcttctaatccctgagcatggaacgtttttccatttgtttgtatcatctattgatttcattaagtggtgttttgtagttctccttgtagagatcttttacctccttggttagatgtattcctaggattttgtgtgtgtgtgtgtgtgtgtgtgtgtgtgtgtgtgtgtgtgtgtctattgtaaatgggtttgtgttcttgatttggctttcagtttgaacattattcaagcattaaaatgctactgacttttttacattgattttgtatcctgaaactgtattgaagtctttatcagtttccagagccttttggtggagtccttttttttttttttttttttttttgtggagtccttaagtataggatcatatcatctgtgaagaaagataatttgacttctccttctcctgtttggacactttttatttttttcttttgcctgattcatcttgctaggtcttctagttattttttaaaatgtagtaaagcaaataaggaagtttatttaaaaagcaagtaccttaaaccactgttagaaaatatttagttaaacagactgacagatcacacaaacacacacacacacacacacacacacacacacacacacacaccataggctctgaagtataaaagaaaaaaataagcaaaccctctaggcctcagatttcttatctttaaaataagaaaaagtgcagtacctacctatgggggaaattcagccagatatcaggcaagattcacccccgatatttcacgtaggttcttttctatttcccctaagtgtcggccattctgagaaataaagggccagagtacaaaagagagaaattttaaagctgggtgtctgggggggacatcacatgtcggcaggttccgtgatgccccctgagccataaaaccagcaagtttttattagtgattttcaaaaggggagggagtgtacgaatagggtgtgggtcacagagatcacatgcttcacaaggtaataagatatcacaaggcaaatggaggcagggcgagatcacaggaccacaggacggggcagaattaaaattgccaatgaagtttagggcacacattgtcattgataacatcttatcaggagacagggtttgagagcagacaaccggttggaccaaaatttattaggcaggaattttctcttcctaataagcctgggagtgctacgggagactggggcttatttcatccctacagcttcaactataaaagacggccaccccctgaagtggccatttcagaggcctaccctcagggacgcattctctttctcagggatgttccttgctgagaaaaagaattcagcgatatttctcccacttgcttttgaaagaagagaaatatggctctgttccgaccggctcaccggcagtcagagttcaaggttatctctcttgttccttgaacattgctgttatcctgttctttttccaaggtgcccagatctcatattgttcaaacacacatgctcttcaaacaatttgtgcagttaatgcaatcatcacaaggtcctgaggtgacatacatcctcctcagcttacaaagatgatgggattaagagattaaagtaaagacaggcataggaaatcacaagggtattgattggggaagtgataagtgtccatgaaatcttcacaatttatgttcagagattgcagtaaagacaggcataacaaattataaaagtattaatttggggaactaataaatgtccatgaaatcttcacaatccacgttcttctgccatggcttcagccggtccctccattcggggttcctgacttcccacaacacctaccttacagaattgcaatggaattaaatgagataaagaatcagaagtacttagcactgttatctgttataaggtcaatatctaaaaacgttagcttttttttcttaccttataggttatgcaattttacataaggaatatctcactgtggaactttggaaaaaacctgctttatcatgtggaaatcttgtcctgactttcttgtcattcagtataaatctatatcattatgtttaataaccaaagttaggtggcatatgtcttcaattcccaatggttactacttaggtaattatcaattattcaatattataaagaaagatagtgcaaattctgatacaaaaatctttttacaattgcaaaatgtttctcttagagtaaattcttcaaagatttccaattaaagacaacattgcacttttaaagtatacagtgattaacagctttgtccccagaaattatattgattgacattttctccatcagtggagaccattttatgacatcatcaccaatgttcactttttcttgctctgttattctagtcaagttgacatttcaatggtgcttataacttgtacttttagttatctattagatttacatattttaatgcttactagcctttttatttatcttctttcatgaattcatgttttacatatttcacttaattttttcctgagtgtccctgtttttattcatgatatataaagacagtctttatatgataaatgttaactcattgcctggtgcttaaatatccactatgattctcagtttgttatctgtcttttcacttgtttatgatgtctatgattgtttattgttacatgagatttctagtttttaaacctcaaatttatcaatatgtttcattatgaccttcagtttaaacaacattgttagaaggttattcttttccacaaaatgatgacaaatattcagtcatcttttcctttcatattttcattacattttaaaaactttttatatttaatttgttttagtaaaattaataaaggtctagttttgttttttattcaacctactaaccagttgtcccaatattgtgtaataatctattttctcccactgttttaaaatgccacagtaattatatataaaatctatttatctgcctatgtgtgcatctctacttcctaatctattgatttcctttctgttattatagtaacagtatactttttaagttaccatagttttacattaatttttaacaactggcagacaatttatctcccatagttttgaatataaaattgttaccacatgtcctacaatcttcaagtgtttttccagagtactgagaactgaaggaaaattggagttactagagtaccctatcaatcaatagtctatgatcaactatctttaacatatagtgtgattacacatagcaaatgtaaacatgtatacatccacacacacagaataagtttgtgctagctcagcatatttcataatttaatgcttctgtaacagtaatgactaccatttttgaatgctttatatatacctaccactgtcttaagtgcattgtgcatgctttattatttaattcttagaacaatgttgtcagtattattacccacccatttgacagatgaggatactaggatttcaagcagtttttatttttaatatgtcacatacagaacctaccaaactccaatgtccatgctcttttcacaatactttactacttctctgttctccacagaaacagtagaggctgagacaattattttgaaaagatagttgagtgagaaataatgccagaaataaataatatattcgaggagaggaagactgaactcacatagtcctgattaggcctctggattcagagaaacatcaaatttctcaatatttcattacagtctgcttatttagctatagacttaaagcaaggggaaacatcaacagctttcagcatgaaatatgaagccaaataaactctctgtctcttatctccttagaattaacttctccaaaaggggaaaaaataatcaatggcttagaaacatcacatttatgtgttccaagcaacaacaaggaaggagcatcagtacaatcctaataagtaagcggggaaaaataatcaatggtttagaaacatcacattatgctttccaagcaagacagtcttaataattagccactgctccccacccactgcatcattctgactccataattagaaagctatgcttgaatctgctttatgttaagtccttgcactttaagtctgtatatgcactaatggttatcaaatgggcagttgtttattttgcaaggtaaggccaagcccacagactgggttgttttaagtactttaaataaacattctctataaaccctaaaatggtgcatttactatgacttctataaagagctcatttacatttatgtggggaaaaaataaatagaacaaagaatcatttaaacctggtcttcactcaagttcaatctctaagttcaagttgttgatactcccttttagaccaggtactttgtggttggagtgcaaattgaggtgggcctactaagcctgcagtcagattacacaggatttccaagatggtctgggaatcccctttggatggtaagcaaccccaaggtggggcccgtttatattccccattgtgcatgctacacagcctgatgcaagcattgctggtgcctaagaaaggcgatcatctgtagaatgtaatttcatccttaaatgtccttgatgtagagaataagcacacattgcctgtacttctttaagtgggcttcagtgcttcacacccacttttttcagtgaatgacattaatattgttaagaagtacatgaaatcagccagatttaagggcactgaaatgcctccagagagagaacacgtttgtgtgaaaaacagttttttttcttttaaattggaggctcctttgcctgtatatataaggtaagaaagaagcatagagtaaactttctaagcactgcctataatggtaacagtgcttactttcattcttcctccattgaatagcattcacactttttaaataagttgtgagagttactctttcttcaaaaccactttgtataacactttattacctatttagaagagtcattcttccaaaaaagctcaggaaaagttaataaaataccatgataagatatttttaaaaataccttatatcgtaataaataagagcctaacaaaggtaatgtagttgggtaggagttgtatgagtgtacaaatatttgggaatagaaagacgtatcaccttcttaagactcttttgggttgaggttaaacaacataaacagctatttaaaaagtgaaaaattaagtgaagaggttattttgcctgcacaatatcatataattagctatgcttatttaactcctttgaataatttattccaatgataaataggtactgacaaagagtagaatggcaaatggaaagaacacttagcaaataattgttcaaatatttgcctttggcaagagaaaaaccttttaattttgaaatagttttatatttacagaaaagttataaaatagtgcagagagtttacatataccttgatcccccagcttcttctaattttaacattttgcatgaatcacagtacaactaagaaattaattaagaaatgaacattggtgaaatactaataaataagtaacaggttttgttaaaattttgctaattatttcactaatgttgttttcctggcctgggatccaatccaggatcccacattgcatttcatctctgtcttcttagtcttttccatctgtgacaattgcttggtttttccttgtctttcatggccttgggacttttcaagagcacttatcagatattttgtagaattatcctcaattaatttttgtctgatgtgttcttatgattaggtgagctcatgcatgaggctgagatgtctcattactgatgatgttagtcctaattacttgatcatttcactctaacgttattatttttccctttgtaatgagtaaatatcttcagggggtgggtactttgggattgtgtcaatatcctgtttctcaaaactttgcccactgatttgtctctcatggtggatcttgcgtaccaccagtgtgaccattctgtctaccatctctttttctagttgggttgcatgggtggactagccttcataccttggtaaatcagatctgataactgaaacacaattcttcttccatgataggtaaagtcgaatataatatgataaatcatattcgtactatgataggcaaagtagaatattagaaattactcaaaactgagtattatattcctacaataggcactgcaaggacaaaaaggctgcagtctaacaagtaacagttcacctaccacataggcaacagattaaacagctgacaaatatctttcaaattagagtatttggtcctaaatctccactctggaaactgggaggagctagagtttttaaccttgtgaaatgtgagcttttgatttttctttttagctaatattgtatcctgaggtacctagattctaacaataaatatattaaaagcagatctattcagagcactgcaggtaatacagaaaaaaatgaaaccaggacattgaatgtactgaattacatgaagagatttgcattatcccacacataaccactagccatttacaggcattgaaatgtggctaatcaaattgggatatgctgtaaatatgcaatacaaactagatttcaaaaagttaacatgcaaaaagaaatgcaaatgtgttattaataattttatattgattacatgctgaaatattttgtgtatattttattaaataaaattcattattaaaattaatatttttatctatgtgtctgcttgaaaacttaaaattacatacatagctcatattttatttctattagacaatgcttaatttgaactttacatgacactccctaaatgaaagtaatttttgaaaacctagtacttctctgaaatactgggttatagagttcaaagaacatgggcactgtagcaagaaggctcaagatcaaaaccaggctttttcacctagtagctgtggggtctatttcaagtttctatttctcatcaacaaaatgaggataaaaatatgtacatcatataggttttgtgaggattaaagaaggacaatttatatagaactgcatttggcacatgccatgcaatcagtagatagctagaatttgtgctacataataattaaaaataaattctaggactctaattgatatccaaggcacatataatgcatactctttgtttctttgttgtttatttattgtttatttctttttcaagagtttttatcttggtgaaatatgagcttttgattttattatttattaatttatttattaatttatttattaatattaacttatattacttttttttagacaaggtctctctctgtcacccaggccagactgtagtggcacaatcatagctcactgaaccctcaaactcctgggctcaagtcatccttccatcttagcctcctgagtagctgggactatggacacacaccatcatgtctggttgatttttgaattttttgtaggaatggggttttgctatgttgcccaggctgggctcgaactcccagcctcaagggatcttcccacctcagcccccaaagtgctggaattacaggcatgagccaccatggctggctattgtttattcctctaaaaaaattacaggtaatagcccaaaaagaatttaatcaaaaagtaacattaattcgtattagaagttaattgtccaattttaaatatccctacctttctttttctaccacattcagcttatttaacaaatttttttgagcaattactaaatgccaagtagatgaggctcgtaataatacaaaacttaaaaattctctggtttcttggagcttatacttcaattagcttatacttcaattaaactaataaataatgcaataaatgtcaggaaattatatgtgtgagaaaggacaagattttctattatctgttaatatttctatctatccgtacactaaataaaaaactaaggagaaattaaagaaactaacaaaatttgttacttacagggagagggatctagcaagatggatccctgttatttcatccacggaagaagtaacaaagtgacatggtgaggcagaaagcagtttgctttgaatgatgaattgtaaggtggtcagtgttcctggaacagaaatgccaagagtgacaagcaacagagatgaggttggagaggcaaccgcagaccatgtgagaggacacataaaacaggataaagacttcttgcctatttataatgtgattgatcactcatccagtgcttagtactagtagaattcagaggattgtagacccatgattccagtccatttagacatgattttcgtagtgacatgaagaagagtgaaccccagagaactccagtgtttagagaggtgaagaaagccagcattgggaaatgagaaggaggggtcattgggttaggaagaaaaccaggagaaacatggtgactacagttaacagtactgtattgtaaactgtcaattagctaagagagtctatcttaaatgttcttaccacaaagcaaacaaattataactaagtgaggtgatgaatgtgttaactaccttgattgtggtaataatttcacaagatacgcatatatccaatcatcatattgtacaccttatattaaatttacaaaactttatttatcagttaaaccccaataaagctggggagggggaagaaaaccaaaaggttttggtgtcctgatagtgtttaaagaagggtaaaatgaacacctggggtaactctactgggaattcaagtaagttgagactgaaattgatcattggatttagcaacacctatctggcttgttgggtgactttgacaaatgaaatttcagagctgtgagggcacctgtgatattcctgacactgtgctaagatatgtggcaaaggtcttcaaggagatgacaatctatagggaaagatgtaatctggcataatgaaggatatggcatcgtataaaactacttgtaagtagtgaaacggtctggtattagcaaacaattttggattagactctttgaagaagattttgagagtagaaaatatatcaagagttaatgtgatttcagtaatattcttttattaaaattaaaatcaaaactttagttttccttaagccttcaatttacaaatatgttttattcataagaaatcaattactctcactagtctaatgagttaataagtttattcgattaaatacgctgcaaacatttagtaatagtgacctaaataagatttctatgagcatttcatactacagtcacaaatataatatatctgattttctcaaatattaaaattacccaataagtcaggcttacaatcaaagaaggaaaaaatctgcccaagcacttaagcaagtcttgtacatgtatttaatctaatttaggaatgtaattggtaagatcttcatctgctttttaaacctcttaaaacatacacaaagtagcaaaatggtataaactttattaactttgtataaacaaaggttatactaaagcataaataccatgccacgtatagctggcctgtatcaatacagaattagctgttaaaatcattggaaacttttatatctttttttctagcatatctcatattatctttttcttttgagtatcattatgaactgtgacttttcacaaaatgtgattttctttcaaaatcagaaatcttcacaacttgtccagggagaacctcttttttagctagctcctttgttcttttagacctgtatgacaatatttttgcacggtggcaacaagttgttcctgcttatcttggttttctctgttctactacattgaatcaactattctcctgtttacatttagaagttaattgaattagagaccaaaatctgggtggtagggatacaatttacgctgttttctatgagtattggtttgtgggtgacaaggattatagatcatttttgtaaagatgccagaaaaataagtctgttataaaggccatgtgtttactttgatgcttcccactgaactccacgtttatgaagtacagtactgaatgaatgtatggtgcagtaatgaatatacaaagtacagtacagtaatgaatgtggacaacgttgactctacgtttatgaaatatggtacaaagtaaatgtggaattacattgtacaccctcatcaagtattgatataagatattttcaatctgctttctgttttttatttgatttctcttctctgtcatatatgacatttttatatattcttaataggctatgttatataagaccaaaccaaattatgggcataaattataagtgtgtagcttttctatactttaaatgaacccccacaagtagtctttacttttgtcttctttcctttttatcagttattatcattaaatatcttgttgaaactctttctgtaatcacttatggacatcagctgcaagagttgaagaacaatgggactacttatctctaaaaagctttaaattcagggcgggcatggtggctcaagcctgtaattccagcagtttgggaggccgaggcgggtggatcacgaggtcagaagttcaagaccagcttggccaacatggtgaaaccccgtctctactgaaaacacaaaagattacccgggcatgcacctgaaatcccagttacttgggaggctgaggcaggagaatcacttgaaccagggaggcggaggttgcagtgagccaagattgcgccactgtactcctgcctgggcgacagggcaagactccgtctcaaaaaaaaaaaaaagaaaactaaaacatgaaaacacccatgcagtctcaagcaatatatgtgtataatattaaaataatagaaatggcaaagaatttgtttataagatattggaagcaatgtatcaaattattaaagcaattaatacattgccaaagatggtccagcagtttgtatcacctcaaaaatgagctaaaaggaaacaaataaaagtaactttgtattggcataggactgcaggaaaagtgatttatagcttatgcaaagcccctcatttctgtacctttctgtaattttgactacacaaaatatgtgaatatcgatccagttttgtgggtgctcagttatcttgccccagtgagtgggactagttcattggcctacacagcttggggaagaggcagggcaagaaaaggtttagagaaggtcaagatcaataaatagcatctttgcaaaatatatttttttaaatcgctcacaactaatataatcgagggctgcaaaatttcaataaaataatgcaaacccaaatcatgcattagacatattttagtatatctgttgataatttgagtgaacctgatgaactctccatctggactttttaatgaaaaattaattgtgtagaaagtggaataataagtctgagtttactttgtgtagttgacagccaacagcttttaagcctcacccttctctcttacctttctgccccacatctgagcgagctggaaaagcccagatactccctcttttggagccaagaggagatacaaaccacacaaggccctgcctgcttgtggaaacctcgtttcaattccattccctaaataccattaaaaactccacctgcgtcttcttctcttggtttttcaggctatttttggacctacttgggaagcccaccctgtaatgatcatagagccccataagtaataaacattttatttccctcttggtatatgtttgctgtgtcattaatcccggtgtctgagccaaattttggttcagatttggtaggggtctattctatttttgtaggatgattgcaatagaaagtcatgtacacttattacagagatttttattgctattgaagttgggctgtgacaaaataaaataattgtaaactacacaagaaaattgccctgtgaaaaccatagtatgtgttgggaacctgcactaagcagacataacccctttattcagaataggttaataattttgggtagataacaaagatctttggccaacttgaagataattatttacttcaaagttacttataagtcattaacattgtgtatttacttacagaattatttttttctataaaaattgcaagctacatcacaaggtatatatttatgtatctgacaattatgaaacacttgcacctgatttgccctttcctaatatacaccttgctgaaaaatcttgagtgaaagtgcttgggagactcacagctgctgcaaagtattaatgcattaatcttcatccaggtcttgtgtttatacctggaatacaattctctccttgcttaaaccactgtctagtgttctatcaaattacatgaaaataccaggtctaaaggaatcacagattgttagatgtagaagtctaatctcttcttttttagagatgaagacagtaaattctaaatatacattgcccgtctcattacacacagtttattagtggtatagctaactcgggattggtatccagacttctccagggttaattgcctcctttacaaccacccttctacttcttcattcccaacattttagacaccaactctttatgccaccaagtctgtggacaagaagaagtgagctatcttatgttgttctcacatatttcaacacaatattcacagacactgaaatctcaggaagtacatctcttaagagctgggattatgtcaattttctttgactgaaaatgtaagaagtcattttccacatgtatatctgtggttataaaagctggttgtgaccataaaacagagtaaagtctaaaaaagtacaaagctaacttcctcatctaggattaagtcaagttcaggtgaatctcttcatgtcagatcatttaaatcagagctttctaagagacggacacgtgtgcaaaactccactgaagtcttatacatacaattttttgatctgttactttcattttgatggtagcacattattcatgctttttctcttaaatatcaaaatatccacatctacactgaaaaatgaaagtgtttttgattaattaccactgatattaatgtctgtaaacagctaatcttatttacttaggtaaataaacagtgacaataggtaagaataatagaaataataggtaacataaagtgcttagcatgttgttaagccgttctcatctgttattccatttactcctcctaataattctactgtctgtaatgaagaatccattatttacccagtgttatgatgaaatgactgactctctgagaaattacgcaccgcttattgtagagcctggctgcagaaccagggaggctgacttctagacatcaggttctaatatgtatagatttttttctcccctggattaataccctgccagtcttgttttaactccaagatcttgcatagcacctagcatataacagaggcttagtaaatatctgttacgtgaaaaggtaaatggacaaccgtggttagttcccttcctgagctaaacaaatgaatgaaaaacatctcacgttgtaggcagatgtaactcagctgagtgcaagagcactgttctcatccatgtgtctgagaaaggcagccaagtgtctttgatgtcggagtttctacaactctccagtgtaatctatttcaccttgaaactagtaagatctacgcaaggaagcattttgggcataacttggctgtaaagaagctcgtatagctccaaggcaccgcattaaaaacaacctccatttgattgctttagtaagaattccctcaatttaactacctcctgccacatctacaccacaggatattaaaaaggcactatccatggttgtgccccactattgatgctgtttaaacataagaaggcaattaacttattgtgctcctgtgaaaggatcaggcttctgggagtttaaacaaattaataaatttgttgaataggaaaaagaattcaccagcttcctctgtatatttttattcagcacaatacacacacgtagagctgtgctgttatttgtgtctagcagctcatgggaagaaggatggttggcagctgttctgtatcacccatggggacaagagggactatgcttttgctgcagcatgaggtcatcaggttcattacagtgaaaatttagttttcaatgaggctttttagatttcggaatggattggtgaaggacatagtagatattgccagataaggaaaatgccccctttttaccgaagtatcaggcaaaaagaggtattccttttccagtataataaacttcagcttttttcactctttatacatcagtaattctcaagtgatgcataaagacaaaatggaattatgtagggagcttttaaaaatcccaagaccttggccatatcaaaaccaattacggcagaaattgtaggggtgggacccggtcaccagtattttttaaagctctcctgatgattctaaactaaactgtaaactgaaggaaactgcttatggggaagctaccccaaaccaactttggtgactgaaggcagtaataaagaaattttccactgagccttaagcgttagcttggggactctgctccttcctgacttaggggctgcatgagcttccaagcttgcagaagaaaataatggcaaccacttctttaaaaagagctgatcatgatcagcataaaaacatattgatggaaaactttttgtggtctgtgatcctagtaggtaatctgggctcagactaatggatttattgggtcaacactgtccctaaaacccaataacttggggttcagaaatcacaatgttgagctccactatgctaaccaatcttgaacccaagcattaaataactagtcatccttttctttggatttgtgtgactttattctttctcaatcccacacttgccttggggctaggaggtgctgtccacaggtgctgttcttcctcttgtaaaattatacatgaataaaatttcaatactttagactaattgtctctgtgttatttttaacgttctcattccccacccctctttttaaactttttattttgagagaattgtagtttttcattgtggcaaatgtccataacatgaaatttaccattttaaccattttaagtgtacaattccgtgccataagtacattcacatagttgtgcaatcgtaattgctcttcctttctagaatttttacaattccaagctaaagctctatatcccttatgtaataactgtccattatttctttttcccagtccctggtaacctctgttatatttttcatttctattaatttgactattctaggtactaaatataagaagaatgaaatgatatttgcatttttgtgtgtctggcttattttacttagcatgttttcaaggttcatctgtgttgcatgcatcagaatttcattcttttttaaggctgaataatactccatcatatacatatgtgtctgtgtttgtgtgtgtgtgtgtatgtgtaagataattgtagatttacatgcagttttaaggaataatacagagagttcctgtataatattcatctaatttcctgcaaagacaacatcttgcattattctggtataatattataaccatgcatatattattgatacaacttactgactttattttgattttaccagtttagatgggctcatttctgtgtgtgtgcatatgtgtgtatgtgcacacatatgtatatgtatttcagtgcagttttgtcatgcgtaaatctgtgtatcagcactgcagttccaacataaggattccacatgctacaattttataacctcagccactttcctaccatcccttctcaataacccctgacaacaattaacatcttctccatctctaaaatttggttatttcaagattgctatatcagcggaattacacaatatgtaacaatttgaaattagcttttatcactcaacctaattcactagtgatccatctaaattgttgcatgtattgtttgttcctttgtaattttcaagtagtaatccatggcatgaatatatcacaattggtttaactgttcatctgtttcagggcatcgagattgttttcaatttgaggctattaagaataaagctactatgaacatttgtgcataggtatttatataaatgtaagttttcatttatctgggataaaagcctaagagtacagttgctgggttttacagtaaatgcatgtttaattttgctagaatatgccatactcttttcaagactagctgtatcattttgcatttcgaccagcaatatatatgtgatccagtttctcaacattcttgccaacatttagttctatgattgctttttaaattttatttattataataggtatacagtgatattgcattgtggtattaatttacatttccctaatgactaaagtgcctaatgatgttggacactttttgtgcactcatttgccattcatgtattctctttgatgaatgtttatttttgatgtcttttgcccatttgcttattagattttttgtttttgtgtttatttttaatctttgagcattgagttctatttctattctagatacatttttttttattgtatatgtggtttgcaaacattttctcccagtctgaagtttgtatttttattgtcttaatggagatttttaaaaagggaagttttaaatttgatgaagttcagttagtatttctttttatgggttgtattttttgatacaggtctaagaactctttgctcagtcttaggtcctaaaaactttctgtttttaaagacccaggtgatgagtacacaaaagcccagacttcaccattacacaatacatgcatgtaagaaatcacacacttttactccctaaatctataaaaataaaataaaataatttttaaaaattaaaaaaaaattctggttttttttttcctcatagtttcacccattacaattaaatctatggtccattttgagttgattctgtataattgataagatttaggttgaggcttcttcttcttgttttttttccccttggcctgtggtttccaattcttccagcatcatttattgaagatccatccttgggatttctggcttcttctttgacctgtaaagggcttggaagttgtcccttcatgctagcagcaagaaaaaaagctgaacaaatggaaagacaaccacttttctaggtctatcagaaaatggctgcaaaacctgaagagagagaggtggctacagagaaccacagctttctagaaactgaatttcaagagcagaaatatgctgctggagccagcaccaacaggaacacttaaactttaattgttgaattactagaggctccgtgtggtctaagttgagagctcacaattcctggggaatgcccagtcttaagggggcttcccacacttttttgagttttacctgaaagagacccagcaagtccttaccatgaggatctgagaaaatctcctcttaattccatcaggggaaggggaaaaataataatttgaaatgtgctcgggggaaagtaatgattttgacatagagccacagtattttgtcctttctttgttctctgtaatgaagaccaatcctcagggggcactactttactaaagtcttatctcatctggggaagggcaatttcctctagctttcctgtctcacataaggggggaaaaaggctaagatgaaagtcacagcccagtccatgacaaaaagtggaggtttaatcataagattatagacccctggctctcccaatatcttaccaacaaattggggctccaggataataagagtggactgaaattgcaagagttgcaagacacagactctatttaagaggtagtttctagggaaatccaaagatagcaggagagacaaaaacaaggactgtagaagaaatgtgagtttctgaaacttcagctatagcaaatattaaacacagtttaacgcctagccagtaaaacataaaaaccacaccaaaatcctgtttacctcagttccttttcccaaagtatcatgtctgaattttaatgagaaaattacaagtcatgctaagtaacaagaaagacatcacaatctcatgagacaaagcaagcatcaaaaccacactcagatatcagacaagatctaaacataactgacggctatgctaagggatatgaaggaaaaagtggacaacatgcaataacaactaggtaatgtaggttgaaactctaaggaagaatcaaaaataaatgctacaaattaaaacatgttaacggaaataaagaatatttttgatggtctcacttgtagactagacacagccaagaaaagaaccagtgagcttgaagctatgtgaatagaaaccacacaaacgaaaatacaaaaagaaaaagaatgaaataaaacagaacaggctatcaaagaattgtggaacaatcaaataattatgatggataggggaatatcaaaagagaaaaaaataaaaagaagaaatatttaaaataatattggataagaattttcaaaaattaattacacaccaccaattttccaaaattaattatacaccaggaagtgcagagaaaatcgaatatggtaaacaccaaaatatctacaccagggcatatcatatttaaattgcagaaaaccaaagacaagtagaaaatattcaaagaattaaccacgggaaaaaatcttacctatataaaaggaataacaagaattacattggacttatcttcacaatcagtgcaaagaagaagagagtggaataaaatgtattgaaaggaaaaagtgaaataaaagtattgaattgaaaaaagaaaataaaacactaatatagaattcagtcctcaaagaaatcattcttcaaaagttaaggtgaaataaagatttttctcaaacaaaaaagaactatgagaattcattgccaatagacctgccttgcaagaaatgttaagagatattcactggagaaaagaaaaaagataaaattcaactcagatagatacccataaagaaaactattaaagaaggaaaaatggaagataaaatcttttagttttttattcttaatttaatggataactttgttaagtatagtaatagcaacaaagtatttgaaaatttgtagcagaaatgctataaaaatagtaggaataattgagaattccttgttataagatgcctgcattaaccatgaattggtgttgaaagataaaatgagtcacaataaaaagttaaagcatttatttaagcaaatagaaattcatgaatttggcagcacaagccgaaaatggtttggggctgtatcaaagtagcatgagggaaggcttttatagagtgaaaatggaagcaaaacaaagaaaatgtttggttaggtacagttatacaggtgccttatctgtttgatcccattgaaaagtctctagttatataagttggctggcatcttccaattggttaaacttacattgacattgtgatgtgatgtgatgttgtgatgtgatgtgatgttgtgatgtgatgttgtgatgtgatgtgatgttgtgatgtgatgtgacgtgacgtgacgtgatgcgacgcgacgtgacatgatgtgatgtgatgttattttgagacagagactcactttgttactctggctggagtgcagtggcaccatcatggctgatggcagccttgtcctcctggagctcaggtgatcctcccacctcagcctccccagtatctggaactatagggatatgtcaccactcctggctaatttttttactattttgtagagacatggttttgccatgtagccaaggctggtcttgaacttctgggcttgagtgatctgctcactttggcctaccaaagtgctatggttacaggtgtgagccactggactcagcgaattttattttaagagtgatattgtgttattttcaaatagatatattaattttaagtgtatattgataactctagaataaccactaatttttaaaaatatataattgatttgctaagtgaagtgaaagaatggactcataagtaatgctcaagtaaaaccagagaaggcagaaaggaaaattttaaaaataataaatagcaagagcaatgaagagaaaagttacaaatatgatattaataaaactagatcattaatcactggaaataaaaatggtctaaatacactaaataaaaaagacagaaaaaaggaatagaaatagaagtcccaaattttcattgtctaaaacattaaacataaagacacagatagataaaaagtaaatgaatggagaaagatcaaccatattaacactaatcaaagggaagacagagtagctatgttaatttcagacaaaacggactttgcagaaaggggaaattatcctcggggataatgagaggtattccataataataaaaggatcaattccccaacaagataaaacaatttttattgtgtatgtgtctaagagcagaatgtaaatatatggaagaagaacactaatagaaattcaaggagatgtagacaaattcactatgatagtcagagagttcaacatacctgtttctatgattgtgcaggtagaaattcagtaagaatacagttgaactgaaatgcagcagcaattaattctgtcatttacagaatattttatctaatcagagcagaatacacattcttcttaagctcgcatggaacatttgccaaaatagacctcattctggaccatactttagcaaaatatataaaactgagattcatagtttgaatgctcccagaatacaataaagttacagtagaaattaatggcagaaagacagctgaaaatcccaaaatatttggagatcaaacaacataattttaaataaaatatggatcaaagaaaaagtctccagagaaattttaaaataacttgaactaaatgaaaatgaaatttaccaaaatttgtgggatgcagcaaaagcagttctgagggagaaccttacaacatagaatacatacattagaaaaaaacaaatatttaaaatcaatcacctcaactttcattttcagaaattagaaacagaagagcaatataaacctaaaacaagcagaagaaagacataataaaagggcagaaattaatgaaataaaaaagtggaaaacaatagagaaaaaaagtctattttttaaaagcatcaatgcaattgataaaactttagccaggttaaacaagaaaaaagagaggcgacacaagttatgaatatcagaaataaaagaatttcatcattactaactacatgcatattacattactacctacatgcatattataaatgaatattctgaacactttatatccacaaatttgataatttaaatgaatgaattaaccccttgaaagacatcatctaccaaaactcacacaagaaatagatacttgaagcccatatgtatttaaaacattgaatcaataattaataaccttccaaacgacaaggccgaaatggttcactgatgaattctaccaaacagtaaaggaataaattatacaaattctctacaatctcttccaaaaactagaagcagagggaatacttactggcttactctgtgaggccagcattacctaaatatcaaaactacaaaaaggcagtacaaaaaaataaaactacagaccaatataacttatgaacatacgtgcagaaactctcaacaaaatattgtcaaatttaatttagcaatgaaagaaaagaattttacactatgaccaaattggattcatctctagtatacaaggatcatccaacattagaaaatcaattaatataatccatcacatcaacaggctaaatgagaaaaattgaataacaacatcaataggtgaagaaaagcatttggcgaaatgtaacaccctttcataataaatctctcagcaatagaaggtatggtggttaatttcatgtgtcaacatggctgggctatggaactcaaatatgtagttaaatattatcttggatgttctatgagggtattttggatgagagtaacatctaaatgagtggactttaaatacagcatattgctgtactttatatatacgtatattatatatgtattatattatatgtgtattatataacatgtgtatataatatgtgtattatataatatattatataatactaatattatatagaatataatatattatataatatataattatatataacatataatatatattctattctatgtatatataatatgtaatatattatataatatatgtatatgtaatatataatatgtgctatattatatatatgtatatataatatataatatgtgctatattatatataatatatttatataatatataatatgtaatatattacatataatatatttatatataaaatgtatattatatattttatatatatgcccttattctactctatagaatatatatatagggagtgtagaagctgtttctatagggacagaagacccatcaaatttaggagctcaatgtccccagcttcattgatgtcttcttacacatcccattccaatctttaggatcccattctgtcccaatcacttccctcacttgcacagtagacatcctaagaagcaggcactgcaatttgcgtggtcattcagccactagcaggctgaaattttgggtttagtcttcagcaatcttaatcctgcagctacaggagaaagcggtttcttcaagggcagatatagaagttttcaatgtgtatatatttatataaatatatatatatatacacacacacactcacctaatttactaaaattatttagtaaatgagtattttattctatagggtagaatgaaaacatacatatatatttttatatatgtatacaaattataaaattactatttattgtataaatacatacatatatatatgtttattctacctatagaataaaatagacacttatttactaaataatttttgaatgaatacatattctccttcatgtttaaaaaaatcatgggctaaataatgccctctaagatttttaacctaatgctctgatttgaggaattaaatatataaatttaatagtgtcttctttgataagaataattcagaattattctttcttttgaaagtttgttgtttgatatctaaatggacagtttctgcccaagtaagtctctggacacgcctcccatcttcaaaggagtgtacttatatttttcccccttcatcaaggcaaaacaatttatttagctaaacaggcactggacaaataatttcacaatatctaagtagaatatttaggcattcaactcctgtctttttatacatctttctttacctatcagcaacttatatctagtgatgataattttgcttctaaatccaggctaaatgttttcataggagactaaaacttgcttcttagcctcaggtaatgagtagaaaaaactaaagtttgcaaggatagaggagattaaatctaaaaaaataaaaagatccccttggtgcgatccaatttgaatctagagaatctttgttccagttctcaacggtgagccacttatgtatgaaaaccaaattgcttccctcatgctaattaaatgcttctcaggaattcatattgtgtttgtttgctagactcttagaaattccaaataattcaacaatcatttgtcctctcatttttgccttcaaaggtaacttaaaagggatgacctcttgggaaacatgttgtcactatctgaaaatactgcatataagtacatggctagaattcattcagaaaaagaggtggaaaaagacatttgggtgcaattctaaaaagatcttgcaaaatgtctccctgttttgaaattcccaacgggatgattctcatccctgcccttcaccttttggatatagaactcataaaagaaaaggaaatgtcttcattttcaaatgagcacaccagtgttctccgtattttttgtcaagattttgtttctggcagggaatttgagaaaaaccaaaattaacccagctgcaggtgtgcacagataatcccttcttctctttgttgaagaggaagaaaaatgtggtcctttttactcagtttaatgaccaggcactgctttatctctccttgaaggactttagaagaagctcttcagtggctgccatggaaaggattttggttttgctgatttcatggctgggaagcttacattaggactgattggagaatctgttttattgttttgccctttcatgtatctctgcattagtagtaatatgtgactaataaagtaaatagaatagagcagaatgaagtttagagcaatcccaaacaaaatatctaactaattcatcttaattaaaagttggcttcttctttttttttttttctttctttcttttttttttttggagacggagtttcgcttttgtttcccgggctgaatgcagtggcacaatcttggctcactgcaacctctgccacccgggttcaagagattctcctgtctcagcctcctgagtagctggaattacaggcacacaccaccaggcccggctaattttttgtatttttagtagagacggggtttcaccatgttggccaggctggtctcaaactcctgacttcaggtgatctgcctgcctcgatctcccaaagtgctgggattataggcatgagccaccgcgcccggcctagttggcttcatttctatcatatgtaaaaatgttgacaatgaaaacaaatacatatgctacttacatgccgagctgctgttgttttacgttagttttctttaaccaactaaattatagacttttgtttttgttttttggcaaggtctctctctgttttgcaggctggagtgcagtggctcaatctcggctcactacaaactcctcctcccaggctccagcaattgtcttgtctcaccctcctgaatagctgggactacaggcgcatgccaccgcgcccatctcatttttgtatttttagtagagatgaggtttcaccatgttggacacgttggtctcaaactcctgacctctggggatcagcctgcctcagccttccaagatgataggattacaggcattagccaccaggtccagccgaattttgttggtttttaccttaaatttcattttactttattatttttctttctgataattgacagcataaatttgagttgtcaagctgcaactgtgtgaagtctaataatgtacattgtgggttatataaactcccaacttttttaacttccttctcttctgttgtttcttatttgttatcaatccctctgtaaaaaaaacaaaaaaaaacaaaaaaaacaacaaaaaacaaaaacaaaacagagaatgagggaatataaaaacaaattagtcaaattcattacggttttgccttgatgaaagtttggagaagataaataatgagaaatttatgctttattatatttttgaattatttgtgctataatttacttttttactttctttcctcatttctctcttattccataccaggtcctttctatatgggttttgcattttcagcttgaaaaaaaaaaaaagataccttcagtatgggctctttatttttgtgatttaaataaaatactcacagccatatatatgagtataaagttttttcctgttacaaaaggtctgttaaaattttattagattcatttttagctatgccatttttattattacatggagtattaaaagtttgcttagatttgcattttattttattttgtacaaatttatggggtacctgtgcaattttgttacatacatagattgtgtagtggtcaaatcagggcttttagggtattcaacactcaaacaatgtatacggcaccccttctgtaatttctcataatcctactccctcctgctggctcacccttccaaattttcatggtccatcattccactctctacattggtacacatgcaatattttttacaatgatgtttatatcctgctcctatctgaggccactcaactcaaattcctagcttgttataatagttttctccatttccaattaatttccatgcattacttgagtagataatttaatcacctagaaacaataaaaacgtgtccctctccttccattcaaagctctatatattatttcttgccatattacactggctgaaacctccagagaaattcttgttcatagtagaaagagagggtgtgtggggctttggaatttcttatttagtactcaaaactcacattctgaatggatcaatgatgtgattttacaactaaggcattacaattggcctcaaccaattttcacttttctcttctaaatgtctgctaggattaccatgtgagggtcctaataagaagtttgtaagttttagaagtttttgattttctgaaatagagggctgctgccctctatcatgtatcatgcttgagtgtgtgcgtgtgtgtgtgagtgtgtgcatgtgtgtgtgtaaaagagagagagagaaagaatatgaccaaaaagagataaaatattacctatctggaaggtgtaatatatgataaaagaaatctctaaaaaagaagataaaataaaacatggaggttaaataataactatcaagaaaattatttataaatactaacctttctagagctgaatggctgaatgacatatgttttaagatttaaggtgcctataaactgctgaacaaaatatatatattttgaaatactttgtatataacttgtgaattttcagaacaccaaggatgcacagaagctctttaaatttccagaaagaaagtagtgacctcttataaagaaacataagttgttttcacaaaatgaaaccatacttcactggcaattctgggtcacagaaatgttttcggtaatgtttttactgatcttagcaaagaagaaatttttttttttacctaaattctacaaccagccaaagtgtcagggacaaaattaaagatattttcatataatcaaagcctcagagttactttccattcatgctttattagattgtgcatatacttgacagcaagagaaatataagagagataagagaaatataaattaaatgtaagggaaaaagctaccctgaaatgcattactttttcttaccatctaactctgagctaacctgatacttttagatttattaaaaaagaataccccacatactttccatgtgaattcatgaacatgggtgattttatttatttgacatgataattaattcataacattaggaaagaaagttacttcataaaggaaatcttggtttaaacaagatctggtggtggagcagagaaggaatgtttaacttattataataaactgctattctcaagcacttttaaaaccacatcagcagtcgcatcagtaatcaacagaataggaaataaacatgttctgttcatcataagggtctcagcaggacccttgcataggtagactgttgttgaaagtggatcctcattactgccctcaagttgaaagtgaacatatggtgcctcttttaacattttctttgtttccagattcaggccaactctccttgcaattattttgaatgggtggaattgtggtccatttgtttctggagcattttattaattttttttcattatggaaaagaatgtgactccacatatcctaagagtaaaaaatacaaggaaataatctcatctaagttatttctgatgtcaaatcacacaatccagaagtcaggctacagtaaaccataaaaagaataagctttattaaaagccactctaagttacaggaaattgcaattaggcgggtgtattactagacatttcataagacatttccatgagatgtaaaggcagatttccggtctttttatgacccgagtacactctgaatacactatatcttatttaacaggtttaaagttaaaatatgttaataacaaatgttattaaagtgtgtccagcctgttttcacagaaaatgatgaaacaaagcagagaggaagaaaatcctggatctgtcttggccaatggttggagaaaaaagggtagtgctacctaagaaaatttaaagcaacatctgtcaataaaatctgttaaaagagtcaagggtaagtcaaaaaacatttccttatattaatgtgttttatgaaaatttaaagtaatttacagtgagaagagacagcagggacacaattcattgtacatatggtatgaatatgagtgttatttatgtacacacagagataaagaaatcgagtgtatgcatatccatatgtgcacacatatattgcatcctctcaataactaagctgcacatatagaaaatacaaatatatgatcccctatatagattgtatagctgtcatccggaaagaatttaagacaactaaaggtttttcatagtttccaaaagagcttatttgtatgcttttataaccctgccaataaacatacaaatgcggagaccaattttgtcaacactccatacctactatccagaattaacaaatgatattgacatttgaatatatttgctttcacatcatcttcttctcttaaataaatacaatgtggcagatctagttggtgccaccctttctctcaatttcttttcagaagctacttctaaactgaaacttgtgaataccatttccatccaaggttttatgcttttgcaacctacgtgtgtgtctgtaaacaatcatattttccatgtgttttttatttgactatgttagcatccttatgtattcttatacaactcgttttattcactcaatgtatcattactttatgacattttattatataaacagactataatttattcctccattgacttactggtggcattgaggttgttagcaatttgtggaactttcaaattatataattcatacctttaaacatgcctcagtgagcacatgttcaaaaacttttctacaacacataactcaaagtgaaattgatgcatggtctactagaaatatctatatattagaaattgccatattgctttccaaatggttattagtgtttacattcccacaagaataaaatatggaagtttttattgttccgtgcctcaccaacacttgatattagttttcccatcatatataacacaaatacagaaagaatgttatttctgtgtgtgtttgtgtgtatacatacacatacaaacacacgagtttaagtttttttggttgaatgagtataatataaaatgttttaagagaaatgtacagaatttaatgagtatcaaatatgagttaatgtcttctcactttatcaaattttattttccatctttattttgaaatggtttaattgcaccaatttattggtaaataaataacattttaagaaaattaaaacagttacccagggctgcacagctcttgtgagcgttttggggtcagagtgtttgttttcagagcctgtttgttttcctctatcttagcatatgtgcctcacattttatgaaatacagttgacccttgaataacaggcatctgaactgaaacagtccacttatatgaggattttcttccacttctgccactcctgaggcagcaagaccgacccttcctctcctccgtcacctcctcagtctattcaacatgaagatgatgaggatgaggacctttatgatgatccactttcacgtaatgaattgtaatacattttctcctcctgagaattttcttaacaacattttattttctctagcttacttcattgtaagggcatagtgtataatacatatacaaaatatgtattaattgattttatgttactagtaagggttcagatcaacagcaggctattagcagttaagttttgggggagtcaaaagttatacacaaattttctactgcacgaggtcagcacttctaactcctgcattgttcaagggtcactgtactttcatatattgtattgaccttgcagggaagatgttctatttagacttaaaacatgtttccagtgtaaggcctacaatattatattttaatcaaattttataaaatcctaaatatattaaatatcctttctaaaaaaattagaaaacaaaactcagatatgaatcactgatttaggaaaacataggtgatagatgtaagatttgaacatagtcctgcttctcagtctatttctctgggcttttatttattcctttcattttgtttcaactgagaaatgttgaagagagtcatctgcaaggactttgtcacagggagcattccttaaagatgagtttaattttaaaaagaaagtgtataaggaattatgggctttctaagtcaatggcctagaaaagttaggtcagagcttcagactgaccaaagaccttgtaagataccatgtatgtttgcagggtttaaggaggtaaatatacttcaaagtatatttctgatgctaaaagagaaagcatttgcttagatccagacatgatatcgagaattgacccagttaaaaagaaaaccacaaagcactatttgttcctcatgaaaattattagaaaaccatcccagtctctagacattataataaatctccatgtggcaatttgcagtttatccttacctctgagttactagaatttttcccacaagtaatttgccttgttgcttaatatttgactactaaatgcagaagtcctcaagagtctttgcgtttcttcttatttttcaatacctgagagaacatgaggtcttcacttcttgggtaaataattataaatacacatgagcagcaatatagcagagtttgtataaatgctggttctggaatcccagtgctggatgcaatcatgactccaacactcacaagcctacagaacctgggatacttatgcaaactcttccagctttggtcttctcatttgtaaaataaaggttttggtggttcatatgtcatgagggttaaacaaaattaagcatataaaataattagcaaaatgcccagcacctaatgagcacctgtgttaaacattattatcatcatttagatctacatgtatacattgcatagttttaaataataatctcatacacaaacacacacacacacacacacacacaaatagccactagagtgcataaaatcactaaagagagttgagcatgcagaactgtaaacgataccttggcaaaattcatatagcaggttcttggagaaagaagataatgcgtgtgtcaaaagctttcaacttcaaaacaattaaagagtttccaataacagggaatttatttggatcaagataatgacttgtatccttttattcactccactctgttgaagtgacagaaaaaaaaatgtaaaaagaaaaataaataaataataggcataggaaaagaaggggtatgtttattaggttagaaacttttcagaaatttccagtagatggaggatggcatgaaaataaggaaacaattaaacagggaaaataaaacccgaaatataggaagcagaaatttctagaggtggtgagaagagcatttactaactaagcctcagaagaatctccccaaattcaacgggatccagagtggcttaggggtgatcatcaggagagttcatttaaggctgagtttgaaagagatgttccttatctatttaagcccggtgacttcagaggcagaactattttttgtttttcagcacaaagttatttctaaacaaggatgagaatcagcctaaagtaggtctttgtcatgagtctggggactgaaatgttaagcagatcctcaatcaactacagactgcattcttccttcagaataaagctcttactaccagcttaattgcgttggcctcacctagaagacctacaaagtgagggtttcactagagaatagttaatgtacagccacagggagaaagcaagagtgcccacacctagaaacagtttcctgccgtccatgttctactgaaggtcctgcctgtccccaacaagccatactaaaacaagaaactgaatccaccaatgcacatataggagtattctttgggttgagaaagaacaacctggccgggcgcggtggctcatgcctgtaatcccagcactttgggaggccgaggtgggaggatcacgaggtcaggagatcaagaccatcatggctaacatggtgaaaccccatctctactaaaaatacaaaaaattagctgggcgtggtggcgggcaactgtggtcccagctactcgggaggcagaggcaggagaatggcgtgaaccctgggaggcggagcttgcagtgagccgagatcccgccactgcactccagcctgggcgaccgagcgagactccatctcaaaaaaaaaaaaaaaaaaaaaaaaacaaacaaaaaaaaacaaggccgggagcggtggctcacgcctgtaatcccagcagtttgggaggtcgaggtgggtggatcacaaggtcaggagttcgagaccagcctgtccaatatggtgaaacctcgtctctactaaaagtacaaaaaaattagctgggcatggtggcacaggcctgtaatcccagctacttgggaggctgaggcaggagaattgcttgaatctgggaggcagaagttgcagtgagccgagatcatgccactgcactccagcctgggtgacagagagagattccgtctcaaaaaaaaaaaaaaagaaagaaagaacaacccagctacctatttaattttaatcttgaaacagatcaataatatgtgttcacagatatgattacatatccccaaatcactaaatgttgaaacaattactatcaaagaaagccatcatctgcaaataaattttctacaaattagtcttcacagttctttaaaaacctattacatccattaagaacagatgaattatgacaaagaaacaaactgttagcattcttagaaatatatatatttatgtatatacatgcctatatatgtatgtatgtatatacaaaattatagaataatagagactgagttgcagaagtgataatgggataaatcaggaggaatattctctttttaaatttctcttatttcaatagtttttaggggtacagatggttttggttacatttataaattctttagtgctcatttctgagattttagtgcacctgtcacatgaacagtgtactctgtacccaatatatagtcttttatctctcaccccacttaacaccttcctccatgagtccccaccttccattatgttattcttatacctttgcatcctcataacttggctttcacttataagtgagaacatacgatatttgattttccattcctgagttacttcacttggaactatgacctccatctccatccaagttgctgcaaaagacattattttattcatttttatggctgagtagcattccatggtgtatagctaccacatttgtttatccactcattagctgatgggcatttaggttggttccatatctttgcaactgtgaattgttctgctataaacacgcatgtgcacgtatttttttcacgcaattatttcttttcctttggatagatatccggtagaaggattgctggatcaaacagtagttctacttttagttctttaggaagtttccatattgtttttcatagtggttgtactaatttacattacccccagcagtgtaaaactgttcccttcttgccatgtccatgacaacatctattgttttttcactttgtaattatgtacttttcacttttttaatctatgtactttttactttgtatttttgcaggagtaaggtggtatctctttgtgattttaatttgcagttccctagtggttagtgatgctaagcattttttcatgtgtttgttggctgtttatatatcttctttagagaaaagtgtattcatgccctttgtccactttttgatgggattatttgttttttctttgctgatttgtttgagttacttgtagattctggatactagtctgttgcccaatgcatagattgtgaatatttgctaccactctttgggttgtctgattactctgctgattatttcttttgctgtacagaagctttttagtttaattaggtcccatttatttatttgtgttgcatttgcctttagggacctagttataaattctttgcctaagctgatgtccagaaaagttttcctgatgttatcttctagtttttgatccatgttgaggtgagttttgtgtaaggtgagagatgggatccagtttcattcttctacatgtggcttgccagttttcctagcaccatttattgaatagggtgtctcttccccaatttatgtttttggatgcctcatcaaagatcagttggctataagtatttggctttatttctggattctctattctgttacatggatctatgtgtgtatttttataccactaccatgctgttttggtaactatagccttgtagaataatttgaagtcaagtaatgtgatccctccagatttgttatttttgcttagcatagctttagctatgtgggctgttttctggttccatatgaattttaggattgtgttttctagttctgtgaagaatgatgatggtattttgatgggaattccattgaatctgtagattgctttgggcagtacgatcattttcacaatatttattcttcccacccatgagcatgggaagtgtttctatttgtttatgtcatccatgatttctttgagctgtgttttgtagttttccttgtatatttctaagtactttatttttctgcagctatcgtagaaggcattgagtccttgatttgattctcagcttggtctttgttggtgaatagcagtgctagtccttagtatacattgattttgtatcctaagactttactgaatttgtttatcagatctacaagttttttggatgagtctttagggttttctaaatatacggtcatatcattggcaaacagcgacagtctgacttcctcttttccagtgtgaatgccctttatttctgtgtcttgtctgattgtcctagctaggacttccagtactatgttgaataaaagtgaaagtgggtatccttgcctttttccagttctcagggggggatgctttcaaccattctgcattcagtgtaatgttggctatgggtttgccatatatggcttttattactttgagataagtcccttctatgcctattttgttgagggtttttatcataaaaggatgctggattttatcaaatgtttttttctgcaacttttgagataatcatatggttttgtttttaattctctttatgtgatgtcacatttattgacttgcatatgttaaaccatccctgcatccctgggatgaaacctacttgatcgtgaaatactatctttttgatgtggcattggatttgattagctcgtatgtcactgagggaggtatattcttaaggaatgaaggataacattttaaaaatggaattgatgagggaaagcaaatatatgtgaaaaataacatcttctgacatctgtttaacaggagtttcaaaatgaaacagtaaaatagagcaagttatgattttaatagaaaatcattactcaagatacatattttcatattaaatctttagattataaaagcctagcaaaaccaaaacaacaaaattgggaatggggcaagaccctcatctaaaaccatcctacctcaaaaagccttgttatgtgagaaaagtaaaacactggatttgtttgatcctgctttttgacattgattcctagtagattcatggacaaccataactcattttatcgtgttttactttattgctctttacagacactgtatttttacaaattgaaggttgtggcaaccctgcatcaagcaagactattagcaccattttttttttcacatagcctatgctcatgtgtgtctctgtgtcacattttggtaattcttgcaatatctcaagcttttgcattattgctgtatctgttatggtgatatgttatcagtgatctttgatgttactatcgtaattgttttggggggccatgaaccatcctctataagatggggacttcataaataaatgttgtgatgctttgactgctccactgacaggcagtttccccatctctctccctttcctcatgactctctattccatgagtcacaacaacattgaaactaggtcagttaataaccctattatgacccctaagtattcaagttaaataaagagttgcatgtctctcacttcaaatcaaaagctagaaattagtgagcttagtgaggaaggcaagttgaaacctgagataggctgaaagctaggtcctttatgccaaacagttaacctagttgagaatacaaaggaaatgttcttggaggaaattaaaagtgctactccaatgactacacgaatgatacaaaagcaaaaactgccttattaccaatatggggaagtttgagtggtctgggtagaagatcaaaccagccccaacattcccttaagccatagcttaattcggaaaaaaagcattatttctcttcaagtctatgaaggctgagagaggcgaggaagttgcagaagaaaatttgaaagctaacagaggttggttcatgaggtttagataaagaagccataaccataacataaaagtaaaaagggaaaccacagtgctaatgtagaagctgcagcaagttatccagaagatctagctaagataattgatgaaagtggctacaataaataacaaattttcagtgtagacaaaacaatcttctattggaaaaaggtgccatctaggactctaccagctgtagaggagaagacgttgcctggcttcaaaggacaggctgactctcttcttaagggttaatggagctggtaaatttaagctgaagcaaataactcatttaccattccaaaaatcataggactcttaagaactatactaaatctactcttcctgtgctctataaataaaacaacaaagcctagatgacagcacatctgtttacagcatactttactgaatatttcaagctcactgttgagacttactgctcagaaagaaagaatcctttcaaaatattactgttcattgccagtgcacctgggcacccaagagctctgatggagatgtacaagaaaactaatgttttcatgcctgctaacacaacatccattctataactcatggatcaaggagtatttaggctttcaagtcttgttattcaagaaaaacattttgtaaggttataactgacatggatggtgattcctctgatggatctaggcaaagtaaattgaaaactttctggaaaatattcatcattcttgaagccattaagaacattcatgattcacgggaggaggtgaaaatatcaacatttataagagtttggaaggagttgattttaattctcaggtatgaatttgagggcttcaagactagtggaggtagtggctgcagatgtaatagaaatagcaaaagaaataaaattagaagtggagcccaaaaatgtaactgaattgttgtaacctaccgataaaacttgaacagataaggagttacaaacaagtgaaggattggagaataggtcaccctacaatatgcctctttggcataagaattattttgtcctgaaggcagttgagaagaaacagatacagaaaagctctctaccttcctcctatttgcctaaaggcaggacacaaatttacaaaggtgttcctcctctactctttaccaggaagggaaaacattgatcacagaagacaaatttagactctcatcagcccaaacagatggaagctgtataataagctttactaagtagactttatccactattagttccccagttgttgccttcctacaattggccactcctagaagctcaaggcccttttcctgtgtcttgtcattttctaagaattttttgttctttgttgaagatgctatgtaagctagagttctaagccacttctataagagttactcactccctgggtatctccgacatatacatgaaatacacatattaataaataggttaggatcagaatcctgaaagacacaattctgactgccataacctcaaatattgacattcctgaagatcaaaatccctaaagtctaacatccctagcatctaagatccccaaaatcacaatcacggaatagttttatcatgttaagtagaactactaacttgttattgcctttatttggaaattaagtatggctaaaaagatgtgtatgagtgccaatttgacaagaggtggacttaattttagatgtcagcttaagtggatttaggaatacttgaaacttggtaaggcataaacttgtctgtgtgtctgtaagagtgtttccaaagaagattcatgtgtgaatctgagtggactaggtggggaagacctgccctcaacattggtggacaacatccaatttgctagagtcccagagagaacaaataccaagtaaattcattctctctgagagctgggacagacttttattctgctgtcttggacatcagagctccaggcttgccaacctttcaattccaggacttacaccaggggtcccaggggcctgaggctttcagctttgaactgagagtaacaccattggttttcctggttttcaatgtgaaaacattaaaacttcctcaataaataaagaaatgttcttatcatacacctgcatttttgaaagataaaatttctccaggtctcagctctttgggtgactgcatatgcattgatgaccctttgaggtttttgatcaatcttgtcaaaagtcttcatctgtccatcacagcatttcagataatcgcaggcataaagctgagtgcacaaaattgccaaccatactgataggcatttatacattttgttttttcacttatttctttatgaacatggttcatttgctagacactcatgtgcctgtcatttgtatacccaagtttacgtttgaaacaatatgtgttatattgccgtttctgtcgtgtaaattatgtatgacatgttctgatgtgttttatatgtttcccaaataaactgcctttttaaaatgtaaataaatgtcttttaacaaatttttaaattattttttccagagttataatttcagaaatttgatcacgtgggatttcaacattcaggattatgacattcagaattgcacctcttgggattaaataagctcctttaataaacttctatttgtttttctatttctaatatgaaagaaacagtaaaattggtgacagtaagagatttcaaagttaaagtttttaaacaggttaaatatgatacaatttcagatacaaatgaaagtaacttttttgacacaaaatagtacatataattctagactaaaattttgataatcagtataaataatgatttatataaaattatgttattcaaatacaatcaaggagatataaaaatatgaatacaacacagaaggaattacaaaagttgccagagatagaaggagatttgtacaagaatattcattactgctgtgtgtgtagtgctaaattattggtcctctagaggagactggagaaatatattttggttcatttatacagtaccaacatgaatagacaacagatatatctatatgatgaatatgtgtcataaaatgtatttcattaaaaatagcgtaagatatacatgtcatttgtataaaatgttatataaaacaactgtacacacatatctgtacatatttgttattgtataaaaattcatacaaattataatgcccaatttccttattagtggataccattgcgaaatagtggatactattgcaaaagtgttggaatgttattgaatagtggacactattgcaaaagtgttggaatttaatttggataatcatagggacttcaacagattttctttaaaagaacctgaaggaaaaggataaaatgttaacattttatgaagtagattaatagacattttattgttattttctattaagttttgtatatttaaaatattttaaaataaataatatctatccaatgagaatcaatactaaattatcaaaagttttagcaaagtgagttagcacaacatacacagatataagcacaacatacacacaaggaaatagcttttataatgtgcagaaaaatcaattagaaaaataacaaaaatcacaataaacacttgagatactataattgctcaaacagaaatatataactaatgtgaaaaagtacacatttttataaaaaactattatttcaacatgggaaaatatatattataaaatttccaatttttcttcaaataaatttataaacaaacacaactttaaagcattttttgctttttatgaaatacataatcttttccaaagtaaataaaagccatcaaaactaatattttcaaaaatatgcctgtaatataatggataaactcattctaaatttgatcttgaataaaaatataaaataacgaagacaattttgatcaacgtacacactttgcaacttgggttatatgcattttgtaaaacaataattaaaagaatgctgatggttacatatgtacacaaatagaatgttgagacaaagctaatatccaaaaaaaaaggcctttgtacttattggaagattgcttttatccatgggaaaattaaatatctctttttgatactatacttaaacgtaaattccaaaggtaataactgtaggagtgaaatcttttgagtaaatgatggaagatatatgatatagaacaaaactgcaaggattcaacttggatttgacagggcatttttccattgtaagtagagggaagaataaaattcaagaagaattttggatttggtggcagaaaaaaatgaagaatcaatgggatccatttccttaatctcatattctgtctggcctcgaagttacgaaacaattagacaaacttcacaacatttgtcttcttcagtcatatgcctgcactgctaggaataaagattagaagccaagaatattattgatccacaagttcatttgcatactctgcaagaactaataattgactgcctgtaactcacaaggtaattcctgaattgtaccacctttcattttaagacaaattttttgtttatttgtcttcattttttgttgttgctgtttcctcaagagtgaggtcttttttttagttcatggactttggccctgtaacaggttggttacatattataactggcctgaacatttcttcaactacgattattctgattttttttaaggctcaaataagttcagttaagcttttttgtttaattctatgtcttggcatgtattggttttagcgaggcacagaagtcaagctatccaagtatgtgaaaagaaccattctcttattatttatggctgatggtgattgggcagaatgagaaaccttgcaggagagcacaatcttttgtcttttgcagaccagagaggtttgatactgttcagaggaaaacttaaaccttgtgctgtttttctatcttcatgggttaaccttctagatccactcatctcaataattgcatgcattctaccaaatttccctatgggatttttatgaaataagttgttcttgctagcatttctgaaataaatactctctttgggaataaatatttagacaaaatcaaggatgaatgttccatgaaagagctttaagtgaagttataaatatttgagaaagagaccaccagcttttgaaactgataacaaattgatttactaacatgattatatcaatcactgaaatctagccatttgcaagcataatactagattgtgtatgttccaattcaggggttaatacatctgtttctactttatggagattgccttaaagtggttttggcatataataagttacttaacccaaaagctgagtgatgggttttgatttagtaagttcgttccttacttttcaattagtgttctataattttctaagaaccaagagacccaaaggagcaaaaatttccatgatcaagaacagagagtttgaaaaaaaaaaatcatttgttaagacattttgaggacaaaattctagaggtgccaaatccaaccagttaattgttgagctatccaagtctttaaatctatctatgatttaaaaacttactcctcagttaccaacaaaataattcagctcaaaagtttgtgtaataagttaatgttttctttttaatcagttttaattgaactgaatttggtaaaataattcagaaatttttgcataattgctttataaactcttattattaagatacatttagttcttagtttcttgaaaataatttaatttgaactttatctttaaatcttttttctctgctttttaacatcctacctatttttaaaggcagagttcataatctctgtttttcactgcatcctctgattcctgccatccacaataatttattttgcctttgaattcttataatgcttcatattttactctgcaaaaaactattcaaatatgattattctatgtttaaaaaataacttcttctaaggttagaatatgtccttcccaaaattaatgtgtcggagactttgttcctagtgtaagagtgttgggaactgggacctttaggaagttatttggtgatgggacctacatgtttataaatggattagttctgttattgtgggagtgggctaattattctggagtggctctttttataaaaatgagctctctttcacacatattctcttgccctgcttctctttcaccgtgttataacacagcaagaaaaccctcaccagatgcagccccttgattttggacttccctccctccagagttgttatccaaataaatttctattggttataatttactcagtctgtggtattttgctacagcattagaaagtttactaaaacagaaaattagtgctgagaagtgggattgttgccataataaatacctgaaaatgagaaagcagctttagtcctgggtaatgggtagaggctggaagaatttggggaagcaggctagaaaaagcctagattgccataaacaaagcattgaggacaattctggtgaaagttctgaggaagagcagactagggaaagtctggaactttttagagattactgaagtggttgtgatcagaatgctggttgaaatatgattagaggccattccaatgaggtctcagatggaactggagaacaaggtattagaaattggagtaaggatgatccttgttataaagtaacaaataaaatgtgcccatgcctgagagcttaatggaaggcagaatttaagactgacaaactaggatatctggcaaaagaagtgtctaagcagcaatgtactcagattgctgcatggttacttttaattatttatagtaagatacaagagaaaacagagtagaataatttggaaaatttgcagcctggccatgtagagtgaaaaaaactatttgagtgtggccaaggaaccatattctaaagacattattatggacagaaaggagccagagggtattcatcaagacaatgggagaaaagactccaaaggcatttcaaaaatctttaaagctgcccctctcatcacaggccaagagttctaggagggcagaattgtttttgtggatgggctttagcagccctctgcacactacctgcccagagctgccttgaaactctgctccctatattccaatgcagtgctcctcagactacccagccatagttcaagcaagctcccttacctttctggccaccgcttcagaaggtacaagtgataagcctcggtggtgtccacatggtattgagtctgcaggcatgcagaatgcaagagccatgggagcatggcttcatccacctagaagtgaaaagatgctgtggaccaggaagcccaagaacaaacttgccccggggtttcggggctctgccactgaaaatcccaatgaaagcaatggctagcggagccctgggagcggggccactcccaggattcccaaattgtagggccacaagcatgcaagtccaacctggaaaagctacaggcaaaagactccaacctgagatggctgtttgggttaaccccagcaaagctgtaggagagaggctgcctaaggctttggggacccaaaagcttcagtgtgcacagaatgtgggacactgagtcacagaaaattattctccagctttgagacttaatgttatttactctgttgagtttgagctcacttggaatcagttacctatgtctcctttttaaaatgagaatttccatcctgtgccggtcccaccattgtactgtggaagcagataactgtttcaatttcacaggctcactgctgaagagaattcacttcagaatgaaatgtttagtctcactaacatctgacttagctgagactctggactttggacttttgagttgatgctagaatgagtcaagacttttggagctattgggatagaataaatgtattttgcattgtaagaacataaattttaggactcaggggctttatgctatggtttggatatgacctccaaaagttcatgttttggaaacttggtggtccgagtgtttggaggtggggcctatgagaggtgattatatcaactaagagaggtgattttatctaccttcatgaatggattaatgccattattgtgggaatgggtttgttagcacaggagtctctgttataaaagtgagctctttcatatatgcagtctcttgcccttctacccttccaccatgttatgaaacaacaagaaagcctttaccacatgcagcaccttgatcttggattacctagccttcagaaccatgagtcaaataaacttctgttgtttataatttactcatctgtggtattatattatagaaacagaaaacattccgaaacaattctcttccagagggataattcaggaataattctcttttttttaacacacaaaaaaaacactctcagcaaaatcaatgaaaaacatgtatttcttcattaattcagggctaaatttcaaaattagactttagattttgaattcaaaataggaaatgatcttttccattatcaagtagatatgagataatgccaaaagacatctcaataatatcatgtcaattcctatatacaaaaccattagataaatttcacatgcttccctatgattaagttatcatctggcttctagtaattagtccccaactaaaaacagctttggttccaaatgttcatatacaaatttattatttgatgataaaactctttttttatcctctgaagaactaatagaagacgtagtcagattttcagaccagcctttaaaactcttcattagattgtgcgtttgttgcatttgcttgctcagcatttatctcttacttctgaggacaatgacaccctgtggggcaacatatctcccttcctcagaccactttcagatgtgggaatcatttggttacctctggccatagtgattggttcttaaagggacacacgattcattttgattaattagagaaaatgccaggactttttttggaaattgctatagtttggatacttgtccccaaacctcacattgaaatttgatttccaatgttggagttgagatctaatgggaggtgttgcattatgggagtggccccatcatgcatagattgatgccgtctccatgggaggcagtaagtgagttctcactctattagtttctgggagagttggttgttacaaagaacctggcacctctccctctctcttgcttcctctatcacgatatgatctctgtccacgccagatccacttcaccttctgctataagtaaaagcagcctgaatccctcaccagaagcagatgctggtgccataattactgtaaaggctgtagaagcataagccaaataaacctctttttctttgtaaattacccagcctcaagtattcctttatagccacacaaatggactgagacagaaacattaggaaataaacactccctttcctctgaggttgccaaattgacaggatgtgagttcatttttatcttgccaagaaactgagagggtatgcatggaaatgaaaccaacacagaagaaagaaaactgagaaaaggagattgagagatactgtgtcctgaaagtacatagtatcctggatctattatagcagtagctgaaatccatgtgcagattttgctgttatatgagctaatattgtagcttttctcctttaaggcatatggggtttgatttctatcactcgtgatagaaattgtcctaagtcatagaggtcatataaacatgaaatactgaaacattttatttaaaggtgttatccataccattgctacaatgaaatgtaaccaaaaatatataaaaatatcaaacttaaagctctgggttgaaatagaaaatagatatttagtcttcacttattcagacaaaggtagaaatggacagaatttaaatacttaagacatttagttaaatgggggctaaagcaaaatactcctatgttctgaagtaactctttggaatctatgagctcaaacttacaaatctggtgaattaggttttcttaagcattctgttattgtttacaaacaattagattatacaatgccttttacatttaaaatagtaattctcatatcaattatttattttaagttgaaatcatgaagttaacttgccgggtactctaatatgtcaggttctcttaaaattgtgaatccttttatgaaaacacacaggtcattcctaaatatagcaggaaacttcttaatagtaagggtctgatttattttatcatctcattatttaactgtaagtcttccagttgattgtaaaatgatggattctaaatagttaagaagcaatatcagccactgtctcatagttccaatgtaacaatctcagaggtagtaaaacaactctgtagttctcccccaggtggaagttaataaatttatgtccttttctgccttttgccttctgatctgccttttgtcagatgatttttcagcacgcctccagagggcaaaggaaaagatttccctcagctcctatactgccgtgaacaaggccccctttaactatgtgcttttgctgggattatattttcttccctcatcacttggacattttattaatcaatgtatttatgtattagttcattcatttatttatttttgagtccaggtattgctctgttgcccaggctggagtgcagtggcatgatcgtagcttacttgatctcttgggcttatgagatcctcccacctcagcctcctgagtagctgggactacaggaataagccactgcatgtgaaccaacttggacattttaaattatcctttctaattcaatgttttatctccctggttgtgctatttacctttattactttatcacatgcaactaccacttcattgcctaatttgattttgcattatgtttccccttgtcttttctggatcttgctataattcttttgtcattttttgaaacaaggcttcttttaaaaaagagacttgcatgttgtaacacttagggattgcattttggatgcatacaacaaacatccaactatcatggttaagtcagggttttttttttacagagtatagggctgacagcagttctattatgccttcaatactgcaatttctttcctcattcttttaatcctcaattgtcctatggtagaagggagtgtttggccttaggtagacagaggaaaagactcttccagcttctattgatctctaagggcatttaattcatgacacttattataccatggagccatattttggagtgaagcctcctaccctccttcattagtttgtcctttacaatagtagatcagaagtactttgaggagaaaaacagaaaataataattaaatcagaagaggtcactttttaataatgaaaagattttggttttagagatgtcagttatgaagggggagatttttaggagattggaaagagattattaggacttaggaaaacgaattgttcctgagagtaaatctcaattctttttttcttcttctttttttttttttttttttagttatagtaatacccagatgtaggttccaaaggtaaccaactgaggaaaaagaaaagaaaagaaaagaaaaagcaagtgaaaataactaccaaaagatgggagaaggggacggtaaggtgcaatgtgagattacaatcttttataggagaaagactacagctaagatttatagtacagaggccaagtaaagataatatagtagaagtttcttgagtgagcttcttactggattcacatctccttactgggttaacatatctgtcattttccaatgttagctgaatccctccagttgagctgttttctcaaacctgattatagcagttgcactctgtactgcaattatgtaattaaattaaatcttatctattctgataaatgaataaagggagagagatttttccacaaaaaagtgattctaaatgctttggaaaaacttgataaatttggttcattaaaatgatattaatgaagtaaagatagatgaaacaactggaaaattagggaaaatgattgaagtatggaaagatttggttgttatattattttgcaggtatctaaattctgtatccacttttaagaaagaaaatctgtatattatagaagttgtattctggtatgatcgatggagaaaaagcaaagcagaattcgattctgcaaacgcatattccaagtacagacaaagactgtagtaatgtatatatgtcaccctggtaacttatgagaaatttacaccttaagggcgctaagaggcttgcttttaacagactctgtagaaaatctattttaaattgatatttttgacatgaacaataacgtgataatatgcttattgtacagatgtggattttgaatagtagattttcttagagcaaaggccagtgtacgttacttcctgtgtagcatacatctcatcaatagatcctccttgtctcctaaaggagaacgttcaaatccccttgacaggcacgggatgggggattttatgtacttgacactctttgcatcacttcatctcccacccttttcccacagcacactgtactccagtgaatccaaactggtcacttttcagggaaaaatttcctgttgcttgccttgcttttgttatatgtgcagttcatttttttctaaaacatttttcttcccaactttctgcttagtaaattctactgttgcttcagtattcaacatgaatttttattacttctctggtgtcatcccagctcctccccctacccacgtacatacctcacacttgtcacacacataattaagtgcttccctctttccgaattcatagaatgccataaatgcttcgattttatcattaacccttgcttgataactgggatttatttgatctttcttccaactagactctggcatggcagaagccaagagttgtacattgttcaatcatttaatccctgtcttccagagcagtgactggtccataacagttctgctattattatttttatattcagcagtttttggcatgtaatgccaatattgtctgatcgtgtcaaacatttccagtgctttttaaccctagtattttacctgggaaaaaatatattttttcacatgagactttagatagttttgtatatttgttaactcataatcgctcagaaatatctgataaacctaataaagacaagatgtatcctgactgagaaaaactactattgagacttcttaactcatcaggaaataaaattaaaaccacaatgagataccactacaaatccatcacgatagctaaaattaaaatacaaaattaaaaaaaacaacgcttttggctagtatatagaacaatcagaaatttcatatacagctgctaagagtacagattggtataccaactttgaaaactatttggctgtttctaaaattcaagaagagcataccccatgcctcataattgccctcctaagtgtgcatatgacatatatgtgtacgttatgtttagtaaaatacatatattagaaagttcatggctgctattcataatagccacaagctaaatactaccccaaaattcaacaatggaatggataactaaattatgggaaatcaaacaatgaaatattacactacaatgagaatgagtcatctgcaattacacacaatggcatggattaatctcataaacttgatgttgtctgaaagaaaccagccacaaaaagtgtactgtatttttacatttttatgaagtacaaaaatgggcataactaatttatgctgctagaagttgaggtagtgattacccttggccaagagtagactgtaaggaggcacaaagggaactgcagggacactgtgatgttttatttctcaaggcaggtactgatttagtttgtaggaattcatcaagctcgaatatattatttattgtatgtatgctgtacttcatttaaaaaaaaatgtaggctgggagtggtgacttacacctataatcccagcactttgggaggccgaggcgggcaaatcatgagatcagaatttcgagaccagtcgagacagtgaagcctcgtctctactaaaaatataaaaattagctggacatggtggcaggcacttgtaatcccagccactcgggaggctgaggcagcagaatcgtttgaacccgggaggcagaggttacagtgagccgagatcgtgccattgcattccagcctgggcgacagggcgagactccatctcaaaaaaatgtagagctatggagtgatgtacactccatagtgtacatatggttctattggtccagaggttggtttaatgtcatctatgtctgtggttccctgtacgttatagatacaacaacttctttgtttttactttttcaaactcacaggttattttttaatttttgtggatacatagtcggtgtatatatttatgaggtacatgagaagatttgatatgggcatgtaatttgtaataaccttatcatggagaatggggtatctatcacctcaagcattctcttttgtgttataaacaatccaattataatcttattatttttaagtgtacaattactattgattatagtcaccctgttgtgctatcaaatcgtaggtcttattcattctttctatttttttttgtacccattaatcatcctcacctcgcccttacacctcccactacctttcccagcttctggtaacgatgcttttactctctatgtccatgagttcccttgttttgacttttagatcccacacacacatacaaatgagaacatgtgatgtgtgtctttctgtgcccggcttattttacgtaataaaatgaactccagttccatccgtgttgttgcaagtaacaggatctcattcattttaatagctgaacagtactccattgtgtatatatatcacattttcctcatccattcatcttgatgaactcttaggttgcttccaagtcttggctatttcgaacagtgctgcaacaaatatgggagtgcagacatctcttcagtatactaatttcctttctttggggttacctcagcagtgggattgctggatcacacggtagctcaattttttttggagggggggaatatcccaactcttttccatagaggttgtacattcccaccaacagtgtatgagctttcccttttctccacatcctggcaagcatttgtttttgcctgtcttttgaatataagctgtattaggcttttcttgcattgctataaagaaatacttgagaccggacaaaatatcaagaaaggagatttaattgtctaatggttatgcaggctgtacaagcaaggcaacaaccatcttcaggggagaactcagggaccttttactcatagcagaagacgaagtgggagcaggcacatcacatggcaaaagcagaagcaagagagcaaagtgaaagctgttacacacttttaaacgaccagatctaatgaaaactcactcactatcttaaagacactactaaatgggatggtactaaaccattcattagaaatgtgaccccgtaattcaattagctcctaccaggctccacttccaaccctggaggtggattatgttttaatatgagattttggtggagacacagatccaaaccatatcataagccattttaactggggtgagatgatatctcattgtagttttgatttgcatttctctgatgatcaataatgttgagcaccttttctaatgcctgtttgccatttgtatgtcttctttacaaaaatgtttattcaaatactttgttaattttttgattagattattatgctttttttcccacagagttgttaaagctccttatgtattttggatattaatcccttgtcaaatgggtagtttgcatatattttctcccattctgtggactgtcttttcactttgttgattgtttcctttgccatgaagaagcttttaatttgatatgatcccatttgtccatatttgctttgttgcctatgcttttggaagattatttaagaaatttttgcccagaccaatgtcttgaagattttttccaacgttttctttgtgtagttttgcattttgatatcttagatttgatctgtatatatggcatgtgtatatggcatgaaataggagtatagttttattcttctgcatatggatatctatatccagcatcatttattgaaaagactgtctttttgccagtaggtgttcttggcgcctatgtcaaaaatgagttcactttaggtgtgtggattgtttttgagctctctgttatgctctgttgatttaaatatctgcttttatgccagtaccatgctgttttagttactagagccctctagaataatttgaagtcaggtaatgagattcctcagttttgttcttttgcttaagatagctttggtttttctgggtcttttatggttccatgtaaattttaagattgttttttctatttctgtgaagaatgtcattgggattttgacaggaattgcattaaagctctagattgctttgggtagtatggacattataacaatatttttcttccaatccatgcacatggaatatctttcaatttttttgtggtctctttagtttcttgtatcagtgttttatagttttcatcatagagatctttcacttctttggttaattcctaggtatttaattttgtctgtagctataagaaatgaaattactttttaatttctttttcagatgattcactgttgacatacagaaatgctattacttttggtatgttgatttgtgttccacaactgaatctgtttattagttctattagttttttggtggagtctttaggtttttccaaatataagatagtatcatttgcaaacaaagataatttgacttcttccattacagttcggatgtcgtttattttttcttctgtttgattgctctagctagtacttcagtaccatatttaataacaggggtgaaagtgggcatccttgtcattttctagatcttagaagaaaggctttcagttttccccattcagtatgatactagatatgcatctgttgtatatggcttttattatgttgaagtatgttccttttatgcctagtttttttagggtttttattatgaagggatgttgaattttatcaaatgctttttcagcatcaattgatatgatcatatgatttttgaccttcattctgttgacatgatatatcacattgattaatttgcatatgttgaaccatccttgcatcccagagataaatccctcttggtcatgatgaatcacctttttaatgcatattgttgcatacggtttgctagtatcttattgaggaattttgcatcaatattcatcagatatattagcctgtagttttcttttttgatgtgtctttggttttggtataagggtaatactggcctcatagaatgagtttggaagtattctcttttcttttattttttggaatagtttgagtaggattagtattagtttttctttaaatatttggtagaattcagttataaatgcctcacgtcccaggcttttctttacttggagagtttttattattgttttgataacagtatgtgttattggtctgaacaggttttggatttcttcatggttcaatcttggcaggttatatgtgtctaggaatatgttcatctcttctagattttccagttcattggcatacagttgctcatagtagccactaatgattctttaaatttctgctgtatcagttgtaatgttttctgttttcatttctgattttatttatttgaatcttctctcccttttccttagttagtctgactaaaggtttgtcaattttaacttttaaaaaaaaaacaactttttgtttcactcatgttttatattgttttcttcatttcaatttctttcatttgtgcgctgaactatattatttcttttcttctgttaattttgcatttggtttgctccttctttgcaagttctttaagatgaatccttaagttgtttaagtttttcttctattttgacgtaggcattttttgctataaacttccattttggtactgcttttgctatatcctgtaagttttggtatgttgcatttccattatcatttgtttctagaaacttttcaatttccctcttttttcattgacccactggtcattctggagtatatcgtttaatttccatgtatttgtgtagtttcattttattgtatatagttttattcaattgtggtcagagagatggttgatactatttcattttcttttgaatgtttgaacacttgttttgtgacctaatatgaggtctattcttgagaacaatctatgtgctgagaaaaagaatgtgtattctgcagccattagatgaagttccacttggtctatagtgcagattaagtctaatgtgtctttgttgatgttgtgtctggaagatctatccaatgatgaaagtggggtattgaagtctccagctatcattgtatcagagtctatctctcgctttagctctatatttgctctgtttacatgggtactccagtgttgggggaatatatatttaaaattcgtatattctgctgctgaatttacccctttatcactatattgtgaccttctttatcccttcttatagcttttgtcttgaagtctattttgtgtaactactcttgctccatattggtttccattagaaaggaatacctttttccatccctttgttttcagtctatgtgtttctttataggtgatgtgtatttctaatagataacagatcattggcttttggatatttaatccattcagccactctacatcttttgatttgggtgtttaatccatttacattcaatgtttttattgataaataagcacttacccctgttattttgctatttcttttttattttttttgtcttcctttccttctatttttcttcatgtctttccttcagtggaagcggttttatctggtaatgtaatttagtttcttgctttttattttttgtgtatccattgtatgatttttggtttgaggttaccacgaggcttgcaaatattatcttataaccaattattttaagcagataacaacggaacactgtttgcataaacaaactatcaagcaaaaataaagctaataaaaattctactccttagctttgtttggtttttgataggttcattgtttaatctttctatttaggatagaagtagtttacataccacagtgacagtgttatagtattctgcatttttctgtgtactcactattattagtgagttttgtgccttcaggtgagtacttattgtttattaacatactcttttttttctgctccctatagcatttcttgcaggatgggagtggtaatgatgaaatccctcaggtttcatttgtctgagaaaatctttatttctccttcatatttgaagaatgtttttccaagatatactattctagggtaaaagttttcttttcttcagtacttcaaatatgtcatactattctcatccagcctgtaaggttttcgttgaaaagtctgctgccagatgtattgcagttccattttatgttatttgtttctgttctcttgctgtgcttaggatcccttcttgatctttgaaagtttgactattaaatgccttgaagtagtcttgtttgggttaaatctgctttgtgttttataaccttctggtacttggctattgatatcattctctaggcttgggaagttctctgttattatctctttgaaaaaactttctacctctacctctttctctacctcctctttaaggccaataactcttagatttgcccctttgaagctattttctatattttaattttttttcttttgtcttctgttactgtgtattttcaaatagcctgttttcaagctcactaattttttcttctacttgatcaattctgccattaaaatactctgatgcattcttcagtatgccaattgcatttgtcagctccagaatttctgcttgattctattcaactatttcaatctctttgtacaatttatctgatataattctgaatactttctatgtgtatgttaaattttttttagtttcctctaaacagctgttttgaattttctgtctgaaaggtcatatatctctgtttctccaggattggtcattcgtaccttatttagttcatttagtgaggtcatgtttttctggattgttttttttttttttcttttgagttggagtctcgctctgtcgcccaggctggagtgcagtggcgtgatcttggctcattgcaagttccgcctccgaggttcatgccattctcctgcctcagcctcccgagtagctgggactacaggtgcccgccaccacgcctggctaatttttagtagagatggggtttcaccgtgttacccaggatggtctcaatctcctgacctcatgatccacccacctccacctcccaaagtgctgggattacaggcatgagccaccacgcccagccttctgggttgttttgatacttgtagatgttcatctgtttctgggcaatgaagttacgtatgtattgtagtcttcacagtctaggcttgtttgtacatgtggtccttggaaagactttccagatattaaaaatttcttgggttttgtgatctaagttacatctcctttagggagcaccccaagtctagtaacactgtggttctcacagacttgttgaggcactgccttaatgatcttaaacaagatctgaaagaattctctggattaacaggcagagattcttgttctcttcccttactttctcccaaacaaatggggtttcttactcttctgagccacctgattctgtgggtggagtgacacaagtacccttttggctaccaccattctgttctgggtctgacttgaagccagtacagtgctggttctcacccaaaacctgctgacaccacttcttggctactgcctatgctttctcaaggcccttaggctctgcacttatcaggtggtaaattcagccaggcctgtgtccttcacttcaaggcggtgagttccctaggacctgggtgggtacagagctgctgcccagaagccagggactagagtctgaaatcttagaagtctatttggtgttctattgtactgaggctgggctggcactcaagccacaagacacagtctttcccactctccacccctcccccatttccaaaggctgaggagcctcaccccatggccactgccaccacaggccacagtgagtactgccagactgccacctatgtttccttaagtcctaagcgctcttcagtcagcttgtggcaaatgctgcctggcctgggacttacccttcagggcactgggctcacctctggctgagggcaggtccagaaatgccatcaaagagtcaagtgctggaatcaggggccccaagagcccacttggtcctctatctcattttggctgagttggtacataaggtgaaagacaaagtcccctttatttttccttcttcttttcccaagcagaaggagtcttgccccatagtcaccatagatggtaatgtgctgagtctcacctgaagtcaatatgtctcagagtttcacccaaggcctcaactagtacctaggtatcactgctggttattcagggcccaaatactcttccgttagaaggtgatgaatgctgccaggactaggtccttcccatcaaagcagcaagttctctcgtggcccaggctgtatctaggaatatcatctgggagctagggcctggaaaggctgcctcacaactctgactagtgccttgtcctgctgtggctaagctagtatctaggatgcaggacaaagtcctccacactcttccctctcctctcctcaaacagtagggagggatctttttagaagccatgagctgtgtagattggcgttaggagagaggtgatggcaatactcccttagccccacactggctggtgtctcagtaggttgcacgtcccttcagtggtctggctacaggcccagttcagcactaggagtcacctggaattgcagcctagaatgtctttcaagtttatttagagccccacagcactttagtctgtagtggcaaggactctgggaactcaagttctgaccgctgggatcagcaattcctctctaactagggctggtttaaatgctctctctgtgagctggtggcaactgagtttggtccagtttttctttctgctgtaatagcacagcattgatttcaatgcttcacaattcctgtgctctccctcctccagcacacagaaaccctctccacagcaaactgctgattctgggaaatagaagagggggtggcaaaagcgattcaagactgtttttttgttcctctttcagtgatacaaagttaaaacaaagtactctgactgcccacctgatttttgttcttgtaaaggtgctgtttttgtgtagatagttgttaaattggtgtccttttgagagggtaggggaatgattagtggagccttctgttccgtgatcttgctccatgccaagctcacttatttagcacttaaatgaaagacttaatgttttgaaatcttctacttgataatagctgcaatgtattgagagagtcctccacttcaaccaggttaagctcaaagatatagagccagcgagtggcaggcccagtatctatacccagatctgacttcaaaacctacgctctataaaacaccttctaccagataatccacatttactcactagtaaataattattttcccatgtttattaatcaagggtatttaattttccattaggtgaatacagctaatattaccggaagaggttgatggaactgcagtactaatgaagaaagcctgacccattagcttttatgtctcgctataaacaactacattatttttcttttgcctttgataaaatttatattgcttttcctttcacttaatctgcacataaccctgagtatctagttatttggatgggaagccagtatttctggagttatgctacaaacatccccaaaatctcagtgcctcacaataaacaagtttaattctcactcatagaccatatgagctgtgggtctatttcattttcgtttattctgaggcagataggataatcagcttctttctggaatattgttaagcttgaggccaagggaacattcagtaatagtagactcatgcaatggcttctcacccctctgcttggaagaggtgtgctcactactgtcaacattttattggctagaataagtcatgtcacctcaaacaactccagtgggatagggagctttaatctccccactagaaaggacaccacaaaattatagggctaaatcttctatcagccactaggtaagggacataggacagcaaacattcgatagtaataatacaggatactggaaacattttaagtactatttagcttccactgtataaataaaataacttacttgtctattaaccgatggagaagcagctatattattttgaattctattgttacaaacagtgcttacaaatctttccttataggcattcacaagagtttctctaagataaacacttagaaatgcagttgtgggtaatcgtttcatatgtatcttttacttcagtagatcttgccaaagtttcctctaaaatgttgttcaactttatcctcttacctgcaatacgtaggaatttcagattctctacataaaacatttctatatgtgctgttaccaggtttcttttggaaataaatgttatagaatgttaaatctgggtgacagtgacatgaccattctatttcttttctgtatatttaaaacatctcttaaatcctagttaatcaaattaattaatatttaataagagtatttttaaataaaaataaaataaagagcagccatagaagcaaattgttgtgaagaattcctaaaagtctcttgtcattatcttctgaatcattgaatgataatagatgctttcttctaaatgttcacacatgcccttctattatttcctcctctatttgctaagcatttcttcaagtacaaacatccaatagaaacaaaaaagacgatttctttgctgttttatgctatttaaactactactagatagagaagaaattgatgcccctttttccgtgttccttggtcacctgtgctactggagtgtgtgcacaattctggggcacatgtcaagttttttttttttttccgtctttaaacttcagcatctctctgcctgaaggtttcttctgacttcagaagcatgttcaaccaacaagtggcaaattagaagtgccaggatgttaatgttccccaaaactaccctcaaccaattggctgctctcacagattcctgaaactctgcagggagagtgttctagaatctctcagagtgttctctgaaggatcgagcctcagttgtccatggtggtaacccgcccatttctgtaccctttttggtcttcctttgtcaaatttgtcctgacatgcattaaagtttcttcaggaaaataaatttacctgaggactgactgccttttaaaatgtttaagacatttaattaaatgggggctaaaaaaatacttaattaaatgggagctaatccttatagatatttaatataataaaattaatttatatttatgaaaagtgcaaattattgaattttcataaaaataattttattttaagcaaacttagaaagttgaacttgacattttaaaaataatgtggctttaaatttgcagccttagtgaatagaatatcatttataactgaaattattaagaagttgtttccatacagtaggcttcctgtagacttaaaataactcacattcatacttttcaacgaaaatacagaggtagaatagattttttggaacaggattaatgagagaagtattttatgctattttattttaatagggtagaggcaacaaatatgtgtttaaagaaggaaaatgatatgatttggctctgtgtcctcacccaaatctcaccttgaattataataatccccacgtgtcaagggcaggaccaggtggaggtaattgaatcatgggggtggtttccccatgttgttcttgtgatagggagttcccatgagatctgatgattttataaggggcttcccctttgctcagcactcattctctctcctgttgccctgtgaagaggtgccttccaccatgattgtaagtttcctgaggcctccccagccatgtggaactgtgagtcaaacctctttctctataaattacccagtcttgggtatttcctcagatcagcgtgagaatggactaatgcagacaagaaaaagatgacagagaaacagagattgaagacacacatacataaacacacacacagactgtttttttccctatgtgataaaaatataaagtaaatatttttgaatgaagagtcagtcactgtatctgtatataacttttgaggaggcattgacctaaatctaataggagatggcaacttaagttaaactatgagtggaaattctgattattttatctttgtgattggagcttaccatactggatgctgacaaacttagtgaaattgttttgattatctgaaatgttgcattactcaggctgatcattctgagagtcatattttctattcttatataatctagaggtatggaagcagtaagagagatgatttaaaatacattgattaagaatgtaatttaaaataaaagaaagaagaacctctaataacttattggttattaatatcacatacactaagcacaaagcaaagcaaaatttatttcactgatttttatttacataaaagtatattttctccatgtgatatatctgctaaaaataaaaaaagacgttaaattaggtggatcatataattgtctgacattgtcttcccaggtagcaagagtgtatctaaaaagatttttttttcccttttctatacttccttttttaccaaccctctccccttctcagtcagatgactccacaccacctcaaggaaaattaggttgttaaaacaaaaggataaagagaaaggcagttgttttgacctccaatatgtgctcctgagcatccaaagagcaggccctggtggaactgagtatggagcaaatcgagaaaaaaggagagaggttgacaaacctgctctagctctcccataaaactcaatgcatgaggcttacccaggctgacagagctcatgcacaaccttaggaaggtggtgttcaaacactagcatgtgttaaaattgcctggaagacttaacaagatgcaaagtttagtcagcctctgagtttctgaagtagatctgaggtgtggctcaaaactttgcatttctaattagcttccagccaatgttgatactgttaatctacagacgacactttgagaactagtgatttaggagaaggaggaatggcctaaagtcaagaaaaggatttaaaaaatcagcttccagatgaagactttattatggcttgctctggaaagccatgtaaaaatgcagccaatgcatacagaatatatcacagctgatcaaataagaatttatattatctggcatagaagatattctctaggtccctgggaattagggctcatcaaagttgccaactgctagcatttggttattttagtaaaagtacttggccatattctgaaatttggctaaatcccatgtaatctcttgggaacccactgtttttaaggatctaaattagttgaaaatacctgaaagcaaaaaatggggcccttgataaacagacatatcaatactaaggtggaaaagaaagtctcagcaccatatttggatgcaactagatgtagcaaattacctcccattacactccaagactccattcatgccttacatactctgattctgtaccttatttataaatgtcccagtcttcttcttctccttattcatgattttccttaatcttttcttatctttttataaaatctacccctctctggcattagctagaaccatccaaatgtcctgttataagagggtatttagcagtgattaattccaataaacatcattattgtttcccatgaatgtattttgaagcttttctgtatcctactgcatcattttcttcaaagttcatattagcacagagaggatgctgttaaatattttcaagactatggtgtccaacatagtcttttgattattatccaaacatcctcaccagtcttgatcttcaagaagacacaatcaactcactgctgctccacagatgtaaaagaacaagttatgccagggaaatatccatgctggtccatctggaacaaaatgtaaacacaaaatctacattttataacatctccttccaatcatatgacaacttggatctggatttaacatgtggacatcaggcagtgaataaaccctgatggcctatctggcagtcatcgtcctgaataaagactggaaagaaaaacaggccatgagggagctgtactatgtcagagcttagcccacccacctgggattatgccatgcaacttgcatccaaagggaaagcttggtcttgcaaagaacctggaataaagagaataagcatatcttgatttgtacacatattcatgacttctgcatggggtaggttattatcagtctgattaaggactaagccatattggagatgagatacattctaaaatttgtggtacttatgtagctttttgggaccactgacattgcaattataatattatctgatcaggccatacaattagcaatggtctgaagtatgaggcaatgtacaatctttgaagtagttctcttttctgcaaatataaaatgttgtgagaagaaaagaaaccttctagatgacaaatgccatccatctactggtaaacatagtttgtgcgtgtgtatacgtgtattactgcataattcatcactcaataaaacaatcagtatattattatgttcatggattctgcaattcaaaaatttcaaaagagcacaatgatgattttgtgtttctgctttgtgatatctgaggtctcaaccgcaatcttcaaatactgcaggtgacttgacgactgggggcttgaatcatctgaagacatttattcatgtgtctcgaggctaatactggtggttggctctctactggggttattgcttaagcacctacataggcaatctcatgggtctgcttaggctttctcacatcatggtggttgtgttccaaaaacaggtgctcaaaaataatcagacagaagatgcatcaccttttaggaattagcattggcttcagtttggtcaaagtcataagccacccacatagaatcccccctcttaatgagaggagcgtcaaatccacactctaggagttcgtgagatgggattattttgcagtgatctttggaaaaagataacctgtcaaggggccatctcacttctctgagtcacacttgcttttcactatttggatgattttcttcttgtattacaaaatgttgggactgccttactgtagcatgacatgtttcactgtgaagacagaaaccttacttctcaagttaaatttgctttgatggacacaattaagattccataaggtacatgctggatgttgggaatgtatcttaatgggagaagacaagaggcctttttttttaagcaaaggagaaatgactcacttctgtgggtcaaacatgaaaaacctttatgatttatctggacctgtgacccatccactttaccttggactaggtggaaaaacatacttaagatgtggaaattgggttaaaaattgctttgactgactgctgctaacagttgaagaaaaaatatttaatgagcaaagcagtttctaaaactagaatccagttaatttgtgcccaaatctgtaccattatttgataagcctggtgtttcatagaaattgaacaacttgtccataagaggtggcctactgcattgggtgatcctggttcaatacaaggctatttcccgtatggaaagttatcttgaaaaccccaaaggtctcaagattctgaacatgggtgtcctaggtaaaggctttgggcttatttgcatctttctgtctctttccaaactctgctaatgattctaaggttcctcacctttctgtgaactttattaaaatgaatgtgcctgagtgagttgggcccctttcctgagtttccctctcctctttcagcagcctaggagatgagacaatgagttaattgaggtagctacctgcatgcaacccctggacgaacctatctctctgttgtttttggactgtagtctatgtaaactgcctcaaaaatatttttttctgaagcttttgccaatattgcaattttccactaaggattttgaggaaaatgaaaccatcagtgaattgttcatgaaaaagcaaaactaatacaccaggcactttatatattgtattttataatgtatttataaatgttatatatataagtgctatatatacacacacatatataagtgctatatatatacatttataaatatatagtacttatatatataacatttataaatatatattgtacatttgcccttcttccattatgatacactctctaacttgtagtgtgtaccttgtagaatcttaatcatgtgctccaaaacaattcatcctttaaaattaagggtcctatcttcacagtgggaaagatcatgtgaaaataagggtctctctccctgtctctcttcctctctctctctacatatacatatcataagataagaatagcaccctcctctatgatgagatgacagttacttcaaggagagtctcatcagttaggaaaattaacttctcccttgtcttgtaaaacagctatttcaggaagatacatacattaaacaactgttcaggaggatgtggtcattagacctcacgtctttgccttctttcacttttaatgaagggtgaacatttggtttatggtaccaaagatataaacatttctatgatttagaatagaggttctcaaactcagggtgcatcagaattatttgagagttcactagcagattgcttctgggcactccactttcagaaccactgctctacagccttactaccctaagtatggtctgtggaccagcaacacgggcagtcacctaggagcttgtgagaaacaaaagatctcaggctccaatctagacctggaaaatcaggatctgcattttagcaagatcatcaggtgattggaatgcccatttaagatcgagaagaagaagcactgttctagaatcataatttgtagccatttcctgctgctcctatttacaattgtattataatatgtgcctctggtcatacctaatgttacagacaatttccactgtacccaacttaaaatagccaaaaaagtgtattctgcatccaaggatttaataatactattaaagtgataattattacctaaaatcattttaatattagtaacaagtagaccataatatatcccacaatttttttttttttttgagatggagtctggctctgttgcccaggctggagtgcagtggtgtgatctcagctcactacaacctccacctcctacgttcaagtgtttatcctgcctcagcctcccaagtagctgggattacaggcatgcgccaccatgcctggctaatttttgtatttttagtaaagacagggtttcaccatgttggtcaggcttgtcttgaactcctgacctcatgatccgccttccttggcctcccaaaatgctgggattacaggcatgagccaccacgcctggccccacaatcattattaatactatagttaaacctacaaaaggtctggggctttcttttactccagacaagagttaaaaaatagtgatggacagcactgattcataagtggaactcagaatgagaacttacaaaagtaaaaaataaaaaaggaaatcacagaagtgtctagacagaaaagtataaattcccacgtagactagattaactaaatcatgacaaaaatgggtatcattatcttcattatcctattagatggaatgtccaacaatatctcatggctaacttagctggctctagaaaaaagagaaatatttagtttcctgagataatttggaaaatacagtcaaaatgtaaaagccttttaatacaaaatttttcttgctagcatatgtttttattttcaaaggggagcttcggtataaattcaatacagcagatacttttacaaatttatgtatgtatgtatatatgagttaacagagtaaaatgtgtaattctaaacattttgctttaggaactgaaagaaacactattctattgaatcaacatattactagactttaaaatgtacatatttaggccaggggtggtggcttacacctgtaatcccagcactttgggaggccaaggcaagcagatcacttgaggtcaggagtttgagaccagcttggccaacatggtgaaaccctgtctttaataaaaatacaaaaattaggcgagcatagtggcacacacctgtaatcccagctacctgggaggctgatgcaagagtatccctttaacctgggaggtggagtttgcagtgagccgagatcacgccactgcactccaacctgggcaacagagcaagactgtgtctcaaaaaaaaaaaaaaaagcaaaaaaacaaaaatacaataaaaaaaaaacccacatgtttagaagatgccagatagctgctgagctcccattcataatatttcttctttccccatgccttaatattatagaaaataaaaccccctaagttaaaaaaaaccatgggaaatagaaaccctgaaatatttaagaacttaagaacattttataatcagattaagagcaaaatctcatcaagctaacaaatctgcaaccccatagagatttaaaatctgagtttccccaaaaactcttgtggaaggggtgcaggaatagatctgaaggagtaagggttaggaacagaagagaaagtactatgggacaattggaccgctgtccccatagtgcaactgaaagtgtttttcttcaagagaaaattaagacaatggttctctaaatcaagtttctctatattgatttcttttacaatttttatgtccgtgtgaatcatatgaacatcttactgaaagacattctgattcacgaggtctgacgtgatgccaggccagagattggacctttctaacaatctcccaggtgataccaacgctgctgcaacatggactgctctttgaataccagggtctacaccatcaataaccaactagaaagtataatgagaaaacatcatcccattcacaataacaatatcccagactatctggaatatattggaaaaagaattcataaaatccaaacaaagaaatattttaaacttttttaaaaaattaaaggaggtaaagaaaattatccatgtcaatgcagtaataagatgcaggtgaaatgggctgactgaagacttctgcctctacttagctgtgtgattctgcagacttactgtgagtctttatttcatcctctgaaaaatggaagggaccaaattcataacttaaagtctccaatagtcaaataactgggtttttaaaatttttaattgagaatccatggaaagtggtctgaagacatgaacaaaaaaacaaatatttattttttctcaactctaattgacatctaacatgtccttcaattaaaagtgatagcccatagtagtaaaggcagaaactgttttgcagttaccagtataaatcacagatatgttcctattacattatacttattgcaaatgtcttaccatcctttctactcatcactgttttaaaattatggtagtagattgctagtcaataaatgcatttcaccacataaacagaattaaaaacaaaaatcatgtgatcatctcaataagcacagagaaagctttcaacaaatcccaacatccctttatgataaaaatccacaacaaaccagccatcaaaggaacataccacaaaataataaaagccatctatgacaattataaacaaaaactggaataaatggagagcaaaatcatgctcatgcatgggataagaaatcatggtaattttgttgataaggtctttggtatcacacactcaacgatttgaattacttatctgagttgagaaacattctaactggctcttcctttggtgctcattattgaaacaaaaaaagaaatataaaatccttaggggaaagggtcaccggggaaattttaagtaataatttccactacaatttttaattataatgtaattcttcccaggctatatggattatttgacatggtcatgttctgcaagactcagccatttttggccaagaggtaactttcttcatggtattttatataatattattctttaaaaactagttttagtggtgattttaaaagtgattatcagcaatcaattgatatctcaggagcacagaactggagcttgatagtatggagaaatatgtcaattgtagttcaaagaatgagtactcgtgaaatttttctaaggactcattccactactcaggaacatgtgtaaatctggcttcgaagactagaaagtagcaaagttttcaagtgctcttaatgaaaatatggaaagccaaggggaagagaaaaatttgagaagtatgactagggcctgagaaggacttgtgcagggtccgaaaaagacactgtagttgagcttggaggcaaagcattgcttagaattttgtttttgcttcttgttagctgtggaatattgagacatttttattgtgcctccctaagactacgaattttacaactataatatggactgataacacctcctggacaggattgttgtaaatactatatcaagtaatatgaaagaaagccctttaaaactctttgggaaacagaaggggctcccaaaatactgttgttcacactggtcctctttcctttccttcctcactgaggtgccaatgaattgaactgcacatcaagtttaagaatgtgacactgagataaaaagtaacacgtatttgcctcaacatttgtaaccctcaaaacacatgtggatcagtgggtgtgtgattcacttttcttcgctcttgatataaatttgggtacttctcaggtcatcaaagacatttgtcatgcttcagtattccaaagtctggttaagttaaagatgtgtctacttacattttcagcccataaaaatgcatgttgatggtcagaaaaaaatgtttactaatgtgccaacttatgcctctacctcaaattcctcaactagggatgcaaacaatactacttacttcataaggatgttttggtatttactaggcacttactagagttcacaacttgtaaaaggtgcaagtaaacaatctcaattattgtacagcagacagaccagactcagcagagtgtcacagatggaacagatcagctggaactttcagactcacaatgagtgaacaagaaaaaagcattaaatgtaacaagacttgcaagcaaaagtcactctgaattccagaaaaaaacatgtcatgaggagaaatatttagaaatacaaataatagtgagtttatcggccacttaatttccatggggacttatatgtcctttagcatacttttaactatacaaatctagcctttcaaacactgacccagaatccgtgacttattaagcccattcatgcctgaaggctttccattcacagtcttgttgtttccacagaaatgtcaggaatatatccttcaaagcacatttccagcttctgctaataatgttatggcatctggactatatcctctgaaagaatataaaacacctttggcttaatatcaaccatcacacaaatgttctcctcatgttccaatgacccattattataccttttcccatcagataatagacagatattgtggtaataaatgtgtgtgttcctaacaggaaactgaaaacaaggacatgaggtgttgtgtaataatagtaggtagacaaggcacttaaggatgtatcattgaagcaaattattttaagaatatttaaaattaaggtgtattgcatcatgctatctttatgcatcttgttcccatcaccaaactttaccatggtgacgaagctaagcgtgaagatgttggaagcactcccatccaatatttgcatcataatccaaatagtagatcatttatatgaagaagtagctgtaacaagaaaattattttctctttgatttgatgaccacttatatcaaattgttaaaacagctttttctacttatgtataattaagacaaagtttaaaataagacagctggtctaagttgaagtttttaaacttaatgagtgtatttgtagaatatgcatattggaacaatctttggtgggaaggaggcctgctcaaaaagtaaagaacagtgcaattttggaatctgtctcctcactgctctgaaccaaggataggaaacagcaaaaccaaggacacataaagcataggacacatagagcatttttcatagttctgggactacacaagtagccttcctttattgttagtgggcaatctgatttgagaaccagcatatatttgctttctatttgcttttttagcttttaaatgacttgaatgtcagcctcccactgattttatcttattgttattaatctgacttgtagaggaaaatatcttttgggaaaatccatctgatatagacccactttaccaataacaaaaaaatgctctacttagggttacgcattttataaagttgtcaattcttgtaaaaatagcattttagaattaagagacaatataaaggggacctgtattagtctgttttcacactgctgataaagacatacctgagactgggaagaaaaaaaggttttaatggacttacagttccacttggctggggagacctcacagtcatggcagaaggcacgtcttatgtggatggcagcaggcagaaagagagagagcttgtgcagagaaactctcatttttaaatccatcagatctcatgtgacttattcactatcatgaaaacagcatgggaaagactcacccccattattcaattacctttcacagggttcttcctacaacacatgggaatgtgggagttacaattcaagatgagatttgagtggggacacagacaaaccatatcaggaccaaataaaaaatctgagctgaatatttgacaaaatggcacacatgccacatctccatagatgagtctttatccatacatcaaaaaggctcaccataggtgctagaaattaggccagagaatgtggctacaagaaaataccagtggatttgtggcactaagctccttatctaaggataaaagacgttacagtaaaacctggaaaatgcatatgctgctgctcttaggtcagtggtaatatttacatatgacaagccaccgtagttaagctcagcagtaatcatgaaatctaacaggtctctaaaattataatattaattatctttttggatgttttaatgggtactaacatttctgattttaagctgaacataaatggatgtttagactatttattagagtttcaccagtgagacagagccgggacccccctcttagagtcaggtgtacctccccaccaagtatggaaataaagagaaatcttgagttccttcaaaggaaatttcaggcacctagctagccttgagaagtaaataaaagatgtgataagccagaatgtaacagtagcttaaaataatagccaatgaagtcgaactcacgagacattttgttccctatagaaactaaagataacaatataagtgtctaagttgtttctccaaagcccagatccctaccaaatggatccattggcatgtagacctcaaataaggggaaactaaggtctgaactttgaccatcattctttgttttaaatttctttctgagaggcctggagaaagtcatgagactacctttgcaaaattacaatagtgagagacatataatatagttgaccccatcttgcttctaacctcacaagctgttcttgcccattcctgcacatacgccaagctagctatgggaggagtttagtttatactttcactttaaaacaaggatgatcatagtcccttcccaaaactaacccctccttgttgcgacccaaaaccagctttatgaacctaatgaaaggctacgactttagaattatgggaggaccctgaattctgctaagtcctaggcatagttaaatataactggttattgttttctagtttgccttttgtaactttcccatttgcccctataatttagacgtagatttctaactttcccatttgcccctacagatcacattgttattgtaaaacctaagatgtgtttgagatatttttcaaactttgcattcttgtggaccaactgatgccgcttggactggcgacaaatccctcccccctagacctgatagcacactaggacaattttggcacccttgtgatttcaccccgatccaaccaatcaatagtaccaattccctactccgctgccctccaagcaatccttaaaaaccctagtgtctaaattcttggggaggcaaatttgaaaaatatttcctgtcctccttgcttagtcatcctgagattattagactctttctctgctataacacctgctgttttcagtgcattggctgtttttagtacttggaatctagaagtgaccaagaagacttaattcctcatagattttaaaatgtattccaacttagatactatcttctacataattctcattttggagaaggaaaacagggtttcaaagagcttaatgactatctttttaaaaaattatttattatttattattaagtgcttttatttgggtgccactaaaaaataattatctcaattaagaaagataacagaaatcacattcagccagaaccaattactttttttctgagcagcgagcaagaagaacccagtggtgacaacagtcacacccatgagccatagctaactcttttctgttaccctccaatttttttttaatgaagcttatcttccttaatcaattgcaaagtaggacctttaaggacctttaagctcctacttcaagacattctaccctgttaagccaaaagcaatacgtaaccttcgttcattgatttataattttgtctataacttctgctttcctaaaatttacccttgtctttaaaaacctttgcttgtatgccatcagggaggtcaaatcttaagcattagaagcctagtcctccttactgggctccctgcaaataaacacccttctttcttcactaaaaaccttcgtgtggttatctggtcttactccatagggcgaatggactctagttgggtttcataacaccaacttggttatagatataagatttatttaaatttctctatttttctaaagtactggcacagagaaaataattttatcaacttacaaatttatcaatatttatatgaattaaaccatgttcatgttttcatcactgctataagaatttgggagaggaaaggttaagtagctacagaacaaatcaaagcctgaagaagacatttccaatgtaacttgttctagctacacttgaaatggaagttgaggaaaatcaactgtgaacaaacaagttagtccattgggaagtcattaagatttacctccttccgtgagtcaaatgttctagggagccattatcattttttccctcagcttatcaaactgcacaaagagaaacaaggtaattcctttacagactcctcagagaaagcccagtggctccacctttaatggcattactgtaaacctcctgagacattgtcagtcagtcttccagggacagaattaatctctgctggagatctttgctggactttattctagattgtttaccctggttttattcttcggaaaagtcagtaaatctcaggtactattgtgggactcagattcacaaatttctccatcattttagctacacaactgcatgtcaaagggaggcatcacttcatctttggggttgttctcttttctgttgcttcagggattgatcatgcatgtaccatcagtcaaagagtgccattgttttaaaatgatcaggaacaacgaaacatggagttggaaagaaccattcacttcagttcagtttaattaaacaaataattactgtgcacaatctacatgccagaaaaacattctaggtgcttaaaatctagaattgaccaagaggacttaattcctcatggattttaaaatatattcaaacttagacgctatattctacatcattctcactttgcagaaggaaaactgacattcaaagagcttaatgactatcttttttttaaaaaagtatttattattaagtgcttttatttgggtgccactaaaaaaataattacctcaattaagaaagatagcagaaatcaaatccagccagatatatattatatatgtcacatggtaaaatgtgagtgaaaccagaacctatttccatctccaacattagctgtgacatatatcttttatagcttcacttttccttctagaaaactgagataataaagcttgatctctctgtacttttcacaatgttgtcaaatgaattacattatgacctgtggctgataaaaaaaatttaacctttagattaaggataatttgaataattttgatggataactgttagcaaacattttaccaaatttatcaagcacaggattgaatgattttcaataaaaagatttagtaccttgcatatagtttataacttcccattctctgcaaagtgtaaacaagcaattatttaaatgtcattgaaagattttctgggtaaagtaaataaagtgctctgcaactattcagtatttttgtgcttcacaggaatgacatgttgtaattaattattgcggtgtacgttctttcttttttctttttttttttttttttttgagacggaatcttgctctgtcgccgaggctggagtgcagtggcgcgatctcggctcactgcaagttccgcctccggggttcgcgccattctcctgcctcagccttccgagtagctgggactacaggcgcccgccactgcacctggcaaatttttggtatttttagtagagacggggtttcaccatgttagccaggatggtttcgattcgctgacctcgtaatccgcccgcctctgcctcccaaagtgctgggattacaggcctgagccaccacacctggcctattgcagtgtactttctaaagataggttttggggatttcgtttaaggaaaataaaaggaaaacatggtaagggaaaaaagaggaagatagtacaatttgcatacttaacttttagaggagatttgattgtcttaatgtctgatgataaccttctattagctatgcacagagacaggtctctttgatgccttgacatacagtccatgtggatttagacctaacagtaactaagtaagacctaatgatgcccaatgtctcagccaactgcctatgactaatatttccttaaatgtgggataaagatagttatgcatgcacaatttctttgtaagtttattgttgtgtcaaaggttgatttttaccaagactgaggtcattaattcagctttgggacttgactgtatccttttttttttttttttaaacttgaaattgctggtaacaaaaaagggagcaagtatttaccttttattttaggccagatcaattctattctctgccaattttcttcctcatctcccataaagtataaagggactgtccttattactattactggtaatagctatttgcttgtaatagcataataatccaaaattctttattgtaataaactagtgagcagttaagacaattgagtactctttttataaatgtgaaaaccaaaagtcagagagatttcctgacatcttcaaggttgcttcatcagtttgcagttggtctgatttagaacacacgactgtctacttatctaaatgctcattccactcaaccaatagttctcaatgtgtggtacccagatcagtagcatcagcatctcctggaagcttgctgtgtgccaacctatgtgatatggttaggctttgtgcccccacccaaatctcatctttaattgcaatccccataatccccacatgtcaagggaaagaccaggtggagctaattgaatcatgggggcggtttcccccatgctgttcttgtaataggaagttcccacaaggtctgatgattatagaaggagctcttccctcatcattctgcacttctccttcctgccgccttgtgaagaaggtgccttgattccccttcgccttccaccatgactgtaagtttcccgaggccttcccagccatgctgaatggtgagtcaattaaacctcttctttcttttataaattacctggtctcaggcagtttttttttttttttttgacagagtcttgctctgttgcccaggttggacagtgcagtggtgtgatctcggctcacttcaacctctgcctcctgggttcaagcgattctcctgcctcagcctccagattagctgggattacagatgcgtgccaccacacctagctaaatttttgttatttttagtacaaatacaacatgtacaagtacaacatggagagatggggttccaccatgttggccaggctggtcttgaactcctgatctcaggtgatccacctgcctggacctcccaaagggatgggattacaggcgtgagccaccatgcctggctagacagttctttacagcagtgcgaaaacagactaatacactaggttagacagagtaagagcctggcaaagacatccgcatcttaattccctgaacctgcaaatagttactttgcatggcaaagggacttcgcaggtatgttaagaattttgagatggaaagattatcctgggttatttggattgacccagtgtaattgcaagggtcctaaaaagagaaaagcgggaggaccacagagggaaaggaaacgtggtgatagaagtagagctcagagtgatgcaggaaaggcaggtgacttctggaaggtagaaaaggcaaggaaacagattctccactggagtatccagaaggaatgcagcccagctgacctaccttggacatcttccctctataacagtaacattatacatttgtgttgttttaagacattaaaattgttgcagtttcttatagcagtagtagaaaatctaagagacatgaaaattggaccttcagtattttaacaagcccactaggtaattttggtggatggtgaaatgggagaatctgctctaaattattcagtagaaacgttaatatgccgacaaagttgtgttacgaagagtttgttaatgaaataaacacatggaaaaaaaacttaaagagaactctgcagaggcccaagggcatcaagaagagattaggcatccagctaggcaagcaaatagagaaagaaccctggggcaggcaggaggtaaagaaaattatccatgtcaatgcagtgatgagatgcaggcaaaatggtctgactcaggacttctgtctctacctagctgtgtgattctgcagacttactgtgggtctttatttcatcatctaaaaaaaaatgaaagagatcaaatttataacttaaagtctccaatacttaaatacattttttttatatttaattgggagtccatggaaagtggtctgaagtcaaaaaacaaatcttattttttactcaactctaattgaaatataacatgtccttgaattatgaaagtaaatgatagcccatagtagtaaaggcagaaactgttttgtagttaccaatagaaatcacaggtaggttcttattacattataattattgcagattctcttaatttcctttgtactcatcactgttttaaaattattgtagtaccttgctgatcaataaatgtatttcaccacataaaaagaattaaaaacaaaaattatgtgatcatctcaataggtgcagagaaacttttcaataaatcccaacatcccttcatgataaaacccctcaacaaactaggcatcaaaggaacatatcacaaaataataacagtcatctatgacagactcacagccaacatcatactgagcatgaaaaagctggaagcattctcctaagaactaaaacaagtcaaggatgcccactctcaccactcctattcaacacactagaggtccatctgggtgcggtggctcatgcctgtgatcccagcactctggtaggctgaggcaggcagacagcttgagtccaggagctcaagaccagcttgagaaacatggtaaaaccccactatgttttatgtatttctctacaaaaaatacataaaaattagccgggcatggtggcacacacctgtggttccagctacttggggtgggggggatcacttgaccccaggaaggagaggtttcagtgagccgagatcttcagcctgagtaacagagccagaccctgcctcaaacaaaacaaaaacaaaacaaaacaaaaacagaaaacaaagttctaggcagagcaaccaggcaaaagaaagaaagaaaaggcatataaatagcaaaagaggaagtcaaattatctctcttctctgatgatataattctataggtaaaaaacacaaaagactttgccaaaaggctcccagacctgataaatgacttcattaaagtttcaagataccaaatcagcttataaaaattagtagcatttctatgcatcaataacacttaagctgagggcaataaaaatgcaatccaatttagaatagacacacaaaaaaataaaacacataggagtatatttaaccaaggaggtgaaagatctctacaaggagaactacaaaatacttctgaaacaaatcatagacaacataaacaaatggtaatacattccatgctcatggattggaagaatcaatattgttaaaatgttcacattgcccaaggcaatctacagattcaacactattcttatcaaattaccaatgtcatttttgacagaattagaaaaaaaagatattctaaaatacatagggaaccaaaaagagcacaaagagctaaagcaatcctaagcaaaaagaacaaagctgaaggcaggcaccacattgacttcaaactatactataaagctacagtaaccaaaacagcatggtactggttaaaaaaatacagacatagattaataaacagaatagagaacctagaaataaagccagacacctacaagctactgatcttcgacaaagttgacaaaaataagcaatagagaaaggactgcctattcaacagttggtgctagaaaacctggctaactatacacagaagaatgaaactggactcctgcttatcactgtatacaaaacttaactcaagagggatcaaatacttaaatgtaaaacctcaaactatcaaaatcctagaagaaagcctaggaaatacccttctggacagcgacctaggtgaagaatttgtaactaaatccctgaaagcaattgcaacaaaaacaaaaattgacaaatgggacctaattaaactaaagagcttctacacggcaaaataaactatcaacagagtaaacatacaacatactgaatgggagaaaatatctgcaaactatgcatctgacaaagcattaatattcagaacttagaggaaacaaacaaatcaacaaggaaaaaaattaaaaagtggtcaaaggtcataaacacacacttctcaaaagaagacataaaacagccaagaaacatgtttaaaaatgttccacataactaatcatcagagaaacgtaattcaaaaccacaaggagaaaccatctcgaaccagtcagaacggattattaaaatgtcaaaaaataatacattgggaagactatggtgaaaagggaacatttatacattgttcatgggaatataaattggttcagccactgtagaaagtagtatgaaaatttctcaaagaactaaaaatagaactatcatttagtcccatcaaccccattgttggatatatacccaaaggaaaataaattattccaccaaaaagacatctgtgcctgtatgtttatcacagcactaactacaatagcaaagacacagaatcagtctaggtacccatcaacccactggactggataaagaaaatgtggtatacatataccatggaatactatacagccataaaaaataacaaaatcatgtcttttgcagcaacatgcatgcagctagaggccattatcctaagtgaatttaacacaaaacagaaaaccaaatatcacatgttctcacttacaagtagtggctaaatctcgggtaacatgagcataaagttgggaacaatagagactgggaactagaagagagggaaggaagggaggtgataaagggatgaaaagtttcctattggatactatgttcactagttgggtgacatgatcaacagaagcccaatcttagtatgacacagtacactcttctaacaaactgtaaccaacctgcatatgtaccccctcaatctaaaattaaaattaaaaaataaaataaaataatgatagtagatgcatcactagatccttattatacaacgcactgatatagtaacacatgtatttcttttttacaaatttatctttttacatttagataactatctttataaaagcttgttttttaaagctatctatgtatgcatacatatatatgtatgtgtattgatatttaaaaaatcctattctgagaaacatttcatagactccgtacaggctgcccatgggattcattataagaaaactaaggcataacttctgatatcatgtgtgtctcaaaatatgatgtaatagaaacaagaaagatatccttataacgcatttacaaatgaagaaacagagaaaaagaaggcaaaaccttgtttaaagtcacttaaataaaactagataagccaagggcctggattcttttctatattctctcatatgtccacctgcatatctctgacacttccagatgccaaactggtatgagttctacctagttacaaatctctgaaatcccatctttgcttctgaattatactaaattatacatatcaaaaaactcaggcctggcacagtggctcacaccagtaagcccagaactttggaaggcagaggcgggcagatcacttgagtccaggaggtcaagactagcctggacaacatggagaaaccccatctctacaaaaataaagaaattagctgggtgagtgcctgtagtttcagctactcaggaggctaaggtgggagaatcacttgagcccaggaggtggaggttgcagtgagctgagatcgctctctgcgctctggcctgggtgacagagcaagacactgtctaaaaacaaacaaacaaacttagggaagatgctctaaatgctttgagaagaagcctgtgccaagtttctaatctcccttagttgtactggcttcaaagtcagttagtggtttagagatacttcccacagaatgagctcaactctcagctagggacaagaaaaataacaaactctgatataggcaatacgacagttgaaaagatgactttgaaatcggatacaatccactgaacagctttccacagtgtgttttgctccgaccatactgtattgcttgaaggaactttgaagtccacattcaaatctgcaactgtttgagtgtgatgcaataagataccctaggaaattacggtggatagatgagttagcctcctggatacccaatgatagatgaaccatgcactcttgggaattcatgagtagttcaaatgatcctccaaaatgttatctgttcatccagagcttatttaaatcatctgaatttcatcaccatccaaaattcagctgacactcatatgaggatttcctttcccatgcaatttctctttccactctcagccagaaatagtccacacactttctgaaggtcagacagctgacaggtctcaagagggctggaaagcaaaaacaagccaaaaagtaaatagcaatgtattcaatgtaaaatctagttgtagagagttaacttcccaagtgaatattgcagacctttatatattgtgctgtggcaatatctgtaaaggatgctataagcatggccactttaatgtacttgtagtggaaaataatacctcatttattcttgctgcattatccaaaatccagattataccatgaaatagcaaaatagaagagttgggaagtttagaaaaaatagtcacagagatgagtaagacctggtgatttaaatctacaaggaaacattcaaagaaccaggactattcatcatggagaagaaaaaactgagggcaactgagaagcatactacctaagaataaatgaaataaaaccaaaaggaaaaaatatcttaggcaagattagagagcgactgtggttcacttatcctgagatcaaaaccaaaggaaaacattataaagtgctctgagaaactgtctgatcttcaacttgttcactttcagggtaattactatgggaaagtataaaatctcctctctgcaaatctctattgaaatattattttctatctgacatcatttaaagatgacttatcttgatttaagaaaatgggcaagattttccaagttcccttataattaataaattcctatattctgtatgttatcctgtgataagaacaaatgcaatcaccaaggaaccctgcctatataaattgccatgtttaaagaggtatcctattaagaaataatgatataaaatggagatcccagctagtgaagggtaaaaaaagtctgcactgagaaagaagcatagtgtgcccccgaatcgtttctcagactcaccttctaatatgctgaagttgttacataacatttggttttaatatagaatgtcgtgattcacacagacacagttatctgtcttatgatatccggtgaaattaagtgggaaatattaaaataacattgggtatggcggtaatattaactgctcaatttttcaaaaaaatccatgagcttcttcacatttcatagccctctggattttctgtggggtcatgtcactagttttaccaatagcctgtgaacagaagtgccatgtctcatttccaggtcaaaatatacaggatgaggtgtaatttcttcacatgtttcctccatgaggctgtgattcacataggaactatgcgctaagaaggcagcactggaaggcaaatactgattgagttgttgcattcttggtgtgagtaataaatagaatttgaagagttaaacatcacctacttatcctgacttatagctgcagtaattcttgagtaatagttgagataaaaacatttccactctactctcaattttcccaataaccactcctgtaaagaaacagcatcactaattgttgactaagggtggggagatgcttttttacccactgattgatggttagttaggcattttattatttaatattacaaacatttgtatagagcatactatagaataaagaaaatgtgtattttgctatagtagaaaaattatttaagcacttttaggctcaggttttggagtaaatactatccatagaattgtgaagcactaagattctggttgaagaaaagtaacaaacatagagttttatagagtaaacaatgtactcaccaccaccattatcgttttctctctctaattctcatgattctttgagatcaggatttgtatccccactttataacaaaaaatcttgcttaacaagaaaaaaatggaattagggcttaagtctagatctagatctcttatttacaggatacatctaccatgcactgagagtgtttcctcactgtgtcaccagggtcctgacagaaactcaaatagggcaaagtaaatgggatttaataaatgaacagttcaaaggtataaaaatgtggataagggaaatcacagggaagatgaaacacccaacaggttgaaatagcagggaagcctccagaaccttagacatgaaggcacacacttgaggcccttgataaggaaatgaccaccatcaacctgtgttctctctccccaacaattgagagtttcttacctgtggcttccattgctccaatacaactgaggatacagggcaaaggagcctggtttatgctgtccattctggtcagcctcctgtggcagagtagggtacacaaggtaggggtgaatccagaaggacaaagagagattacccagcctacatgtcaatcactttcatatatagataaaccacttggacacatctgtattggaaagaaatatatctccatgaaaggcaacctgaaaatataattaaaaatgaaattgagtcaggtatgaaccatttcctaggcaaggattttttcatatattagtcagagaacacagctggttgtgaaagagaagagccttctgaatttgagcaggtgtatgattctgatgaaaataaggatatgagtcaagaaaaacagatgaaagaaagaaaactgttgaatgaggaggggtaaggaattgaggaagagtatggttgtatgacttgggaaaggcagatggaaggctgacatgatcatgatggaaagacagctggagttaagaccttgttgataataaatacacataacatgttttattttagttattatatgtagtcttatggaaaaataagtctctatttattcacaataatggggcatgctagcttttaaaataatgagttctgagtaaattaacttgacaaagataagatgagggcaagtaaaaattctataatgcctgcattctctcttttctcctatctctgtttaatacagcccaattatatttccatgaggatataataagacaagagatttcatttaagaagggggattgggtgggagagagagagagagagagagagagagagagatcctctagcaaaaatccagggattataaagatgaattcaacctttgactcagtttcatggtatctgaaacccagacaagagttttcatctattcttctgaggacagttccagagattagctgtgaggcattatctgtataataagacaacttttgttcacaatgaagttctgcccttcatcttcccatcacctctcccagagcactgaagaacttcgttccagcccattttttttaggctcatgagtctacccttaaaatcatttcaccctccatctcctcttcccttattaagtaggatttataagcatctggacctcattgagttattgggtaatcacattcatgtgattttttcctcatgcatattaataaattttgtaaacatttttctcctattaatccaccttttatcagctcattttcagtgaaccatccgtaagcagtgaggatgctttccctctacctctacagattagtaggaggtgttgaaaacaaatcccatttctcattttcattgatggttcactgtatgagtgagtagtatctgcacagaagagttcatgacccaggagtaagattcaatctttagaaacccttgctcatctcaaagaatgtttgaaaataattgcactagtcaattcctctaaacactaggtggcttcacactaaaacctcatctcatttttagcttttccagatttgctggcagatttagcaacagcaggtttgcactcctaacatagcaaccccatggagggtgcaggtaacgctgtgctctttagatgaggcacctgttctcatctagaactaactgctaacaagctatatatcttagtatagctttaatccttctatactaacagtcttactccactcacattcaattctattttctgccagatccctcctgacatttgatgttgtcaacaataattcagactattgtgacatatgatgtattataattatgggcttatgttatggacaaaatcatactctcagagaacccacaaacggttccagtacagaattatttaaggttccattaagaccaaagtaaattattgcagtgctggccaacaatctagatgacctacttaggaaaaggcatagttgcccaaactgttgttgcttttttacaatttttattttttactaagacttggttcttccaatataccactaaagtcatctgggcatggagttcatttgaaattaatgaatgatccaaaggcagatgaatttatgtcagaagtaggccagttttaccatgtaaacagtattaccaaatattgttttctgttccgaaataaatgttgcccaattaagcatcaaagtgacaatatacatttggctgttatttgctttccagaatcatctggctccgtcttttcattgtatctgggtgttcctgtcatcttgacattcaggccagtcctgaagttgcacaatgcaagttgaggaagcaaaagaaccactacttaaattggtccatgcagatttctcctgaccattgtggttatttgttaggattctccattgcctggggtctttttgttttgactttactgtacagccagagttgtatggctgccccatgaaataaatttagtttctgtatcagtagccacattagagactaccaagagttcttaaacatttgtggtgccatggacccatgttgtcaggtaaagcccatggatctatctcaaaatcatgtttctaaatgcataaaataaagtacataggattacaaacaagcaattacactgaaatatagtcatcaagatattaaaacatgatatattcaaatatattttatatgttatatgctgattcattactatgttaaatataaatattttaaagtattataataattatcataatttcaaagtctggatgtacttaatgatattctgagatatttacaaccaccattctatgagatgacaatatcaggagtccttttaaagtgtggtttgctgcctatattaacaattgaaggaaatgctaaatttcatttagagtatggtaaaaataaagattttttttccattcaagtgcatagaacccttgaattctattcacagaccctttggaggtttatgaaccttaggttcaggaaggatctattcaaatctagattactgccgtaaaaatcaaacacttctgctgaaccaagtcactttagtggaaagagaagactggtgtggagtgagtttggaaaacacctcaatctattgagccgttcagagactaaaacatatattaatataggtttttaataataatagcaagcatcctatcttctattaagtgaagacaaaaaactactacttaaacttattgtttccaaattagctgattgatcttccacccactgaactggctggctagtgatttgttctcacgtaaagggttagaagccagctttccaaatagggctcactagtaggtttaaggagtgaacatagaactaatcacaacacatagttccatcagtctagcaagcaagcttcgtgtattgtaatcctagcactttgggaggccaaggtgggcgaactcctgagctcacgatttcgaaaccaccctcggcaacatggtaaaaccccgtccactaaaaataacaaaaaattagccaggcatggtcacacacgcctggaatcccagctactggggaggctgaggcaggagaatcccttgagcctgggaggtggaggttgcagtgagccaagattgtgccattgtactccagcttggacgacagagtgagactctgtctcaaaaaacaaaaaacaaaaaagacaaccttcagccagcttttcctttgtaaaaatattttgtagtaatgttgacatgtattagttctctttgcctgatttgggagaaaagcaatttcaaacagaaattttagttagtcattctttccagctttgtttcccctccacaaagcggcaatgtcttaaatttctcatttatgagttgctgccagactctaatcatgacagactgcaggtaagaggaagagtcagggacaggccttgtaggagaccagtactttacattttgcagcatatgaatacactgtgcacccctaagggccagtgaaagagttaaaaagtcatcctctatggaaaagtaaaaaacctaaatagttattttttaataagctcctctcggacaaaacatttttagaacagttactcaccatatgacagcattcaataaatgtttattattattttccgcaataataacaacaatgtgttaaagtgctttccaaccaatctgaaagctaagctgaggaggaaggggacgcttgtcattgcctcctctcctttcaagccaccacaaatattatgctcttgctattttgtttaacttgggccgaatacacttcatagagtaacaggcagggagagttaggtccattaagaagaaacttcaaaaaccctctggctttggggctttcttgtgttattccacctcaaacccagaggatatgaaagatgggaagattagtgagggttttgccctggctgttcttttactgaatggcttcacaaatgccaattgaaataattatcaagccattatgatgatttgcattaaaaatggtaactttagcaagcagtccatgtgtgtgtaggagggcagttggggggtagcatgtaacgttataaaaggcccattgaagccataccagcttcctggcttcccgaggattaccacacagtagttcacaaaaaggttgttcttccagctctatttatactcacagtacttacagtgcacgctcccagcacacccattcctggtattgatttgtgcctatgcccaaattatcatctggcacacacaaggcagcagcttctggagatggtgatgcaatgcttggatcctggtagaacaaagacagggcctcttcttatcaaaacttccccttgctgctaagataaaaataccagaagccctgggtaccatttcctacttatttttttttctttttcacccaactgtctcattaaagccagtggtttaccctccatccccctttgagtgtctacttaaaagaacaaggcaagatattatggggatcaaattttcatttaatttgccacttttattagtgagggaggcagttaccttataaatgattttaaaaatatttgtaaatgatggtttgtcaacatctcagactcactgggtgaaggggctggtgcagtgaatgagagtgtagtgtctgacaactgctaacatcataggtagcagttctcaaaaggtgcagggggaggaattcaggcaagatgaggaaccgtgtggcccaggaagctattacacgggccatgctttaagtatttgctgaaggtaaccaaacatgtgttgtggaacagtttgaccaaataggcactactgaattctcaaccttgagtatgtccccgaattgcccaaggaaatgcttaattattggggttgatagactccaccccagagaatctgattcaataaattagacccaggaatctgtattttcaataaacaccaagatgagttcaatgcggttggaagaataaagacttctcttaagggcaagctggataccataagtttttgaacatttcaggagaaacctattaaaagacaacattacaacaatttagtttaaaatataattggcctttatttgaaattctagaatttgtcaatatcacattctataaaatagaacgggtgttccaatgagctcagcagagaaggttgaccttatagagaaaaaagggctgaagcaagtagaaacagaacaaaaagcagattgttggtttcaaagttactttccttgtaggattaaaacagaggaaacgtccttattatgctgaccagggttgactggaatctcctggttttttgaaaactggctcatttcaaagttaagtttgattacatggcattagcacaaacgacttcattctggttgggtctggtctgctggagcccagtgcaggaggctggtccaaaacaatggcctcctataaactttaataaccctaaacaaaatgacaaattgtaagtgtacagcttaatagatcctcaaaagaacagatatttctgctattcagcaactgccttaaaaagaaagtagaggatgttttgaggactttagaagcctaacttacgctcatttctagtaattgctgccaccaagaggagcctaacttctaatgccataattacttttaacctgtttctgaactttatagaaataaaactctaaaggatgtactttttatattttcttttactcagtattctatttgtcaggttcacccataatattagctataggtatattcatcacttcctttcttaaaaaatgtattttcttaacattcactttgagataggtgggtctttcaattattatttttagcttttcgaaactgttatcttttcttttagtaatgagtcagctagctgattccaggtgtccacgttgagacatgccaaaattaatttttagccatatgttgtttgtttaattaaatctacggaaacaaacaaacacaaatgatggattaggaagacaaagtagaatagaatagacttaaggaaatacatgaactttaaggaaatgtctgtgcctaaaatatttgtttttaagttctcacctgagttgctccatggaaagagtagttttgtggtttttggttttagagattaactttcaagtagctttgaataacagttctcaaaagaaagaatcctgcttccggggttcagagtgtagtgtctgtgttccaccacagggcctcagctcaccagtttcattccctggaaatagaagatccagggatggtctgctatttaaacacaaggcctcagctcaccagcttcattccctggaaacagatgatccagagatgatctgctatttaaacaccacagggcctcagctcaccagcttcattccctggagacagatgatccagggatgatctgctgtttaaactccaagctcatcattcattacagtaattttcttcaatgtgtcctcttcaatatgtcatgtgtatttaatgaccacaaaaatgcttgtgatgctaattgtgcaggtcagcatttccaagtgcccacatgacctctgggctctcgcacacgcagtggcatgtccagacttcccagcacattattccttagattgattttcccatgccatttcttagaatgggctgggaggtcccattggtcaagtgtttggttcttcacatcactgttctttatttgaaggtacgtcggaaaccacagcccccttccccatatatattttttttttatttgagatggagtctgactctgttaccccagctggagtgtagtggtgtgatctcggctcactgcaacctctgccttccgggttcatgcaattctcctgcctcagcctcctgagtagctgggattacaggcatgtgccaccacacctggctaatttttgtatttttagtagagacaaggtttcaccatgttggcctggctggtctcgaactcatgacctcatgatccacctgcctcagcctcccaaagtgctaggattacaggcacacccggcctcttccccgtattttatagttagtcttggtattaagccctgagcggatggaccacacaggttgaaagaaaagcagatggaaaagagctaaaattcaataccatgattccacgacaacccacattagaatctgtagtaaacagtagatcctatcttcaagggtttattttggagagagtggaagatataataaacaaataaacataaaacttaaattctaataataataattgccctgaaactgggccaaggaataggaagtttacacaatttgtggggttatttggaaaaggggatcagagtggttctgtgaggagatgacatttgagcaggacatgaatgatgccatggagagtaagatgcaacaatctcagtgcaaaacattgctgatgatgggaatagcccttgcaaccttctcactatgccaagcactatctaaacactgtatatttactactgtgatttttaacatggctctgcagtgaacatggcctctttgttacaaataagaaaactgaagcttagcccagtaacttagtacagcatgagagtagtggagctgactctgagacacctgcagcctggttatagccttgctactctttctttcttttcttttttttttttttttttttttgatactgagtctcgctctgttgccaggctggagtgcagtggcacaatctctgctcactgaaatctctgcctccctggttcaagcgattcccctgcctcagcttcctgagtaactgagactaaaggtgcacaccaccatgcctggctaatttttttgtattttagtagagacagggtttcaccatgtaggctaggatcgtctccatctcttgaccttgtgatcctcccacctcagcctcctgaagtgctaggattacaggcgtgagccacctcacccagccgccttgctactcttaaaggccactctataatggctccagcattaagtaaggtccatcttggtttgttcaaagccactgtggctgaactgcagttaacaaaagcacaccttctaaaaaggcgaattattttatttataaaagtctcccaaatacttacacccattgctatagacttagaattaattattccatgctggcagattggtagccttccttcacaaaaatcaaagagctattttatttttaaagaaaatgatctttttgggccaggcacagtggctcacgcctgtaatcccagcactttggaagaccaaggtgggtggatcacgaggtcaggagatcgagaccatcctggctaacatggtgaaaccccgtctgtactaaatacaaaaaattagctgggcatggtggcacacaactgtagtcccagctactcgggaggctgaagcaggagaatcgcttgaacccaggaggcggatgttgcagggagccaagatcgcaccactgcactccagcctgggcaacagagcgatactctgtctcaaaaaaaaagaaaaaagaaagaaaatgagcttttttcagcatccccgggatgcctgatgtttatcaaatgtagtgggtaaggtttaaaccaccaggtgatatattggaggtggagggtaaaatgttttttcttagtcatcagccaggtatctgatcccaggagaagatctataaatggattgattcttgatcaaattttaaatcttggtggtaggaagatgttagtgaagcttcagtgatccttgtcccaaagcactttcagtatgtcagtacatcagcaaatggctgatataggaagtgcaagcttccaactctccaagtactgttaagaggtggttccactctctgaagattcaatgggaaaatacagtgatttttattattcctgcactgggagaagtctccatggtttgagaggaaaaaagagatgcttttctggtgtgtgagccactctctagaagacaacaaacaccagcactaacttgttaggacccctgtttgaatgcaggtgaaccaaaggaaagtaatttgttctaccaaaaagacacctgcactcccatgtttattgcagcactattcacaatagtaaagacatggaatcaacctagatgtccatcaatggcggattaggtaaagaaaatgtggtatatttacaccatggaatattatgcagcaataaaaagactgaaatcatgtcctttgcagcaacatggatacagccggaggccatcatcataaacaacacagaaacaaaattctaaaaaaaaaattttgaaaattctgtaacaaaaaagcaaattctgcatgttctcacttataagtcggagctaaatattgggtactcatggacacaaagatgggaacaataggcacgagagactaagataggggaggcagggaggagagtaaacattgaaaaactacctattgggtactatgctgactatctgcacagtacccaaaactgtgtgtattaggccattcttgcattgccataaagaagtacctgaggctggacaatttataaagaaaagaggtttaattgccttttggttctgcaggctgtacaagcatggtgctagcatttgttcagcttctgtggaggcctcatggagcttttactcacagcagaaggcaaagccggagcagacatgtcacatggcaggagatggagcagggttggggagtgaaagtatcacacacattttacaatcagatctcatgagaactcactcactatcataaggacgagaactagaactaagccatgagggatctaccccatgtctcatacacctccaattgtgccccatttctaacaatgaggattaaaattcagtatgagatttacaggtgatgacatccaaactacatctctaagtgttgggttcaatcactccccaatcctcagcatcacctaatacacccttataacaaacctgtacatgtaccctctgaatctaaaataaacgttgaaaaaaaaaaagcaagggacttcttagaatcatggtgtcaagcggccctaccaggacctcctggtagcagcattccttcccccaatgtttcaatttagtgtaagctttttttatggagagaatatttttctctaaaaacaatatgataaaaagcccttgggatagcctttccctgacaaagttcttccagaaatctctttctcatgtttgagacctctactggttcgatctcttaaataattttgtttcccctgcctttatgacaactgttattacgaaacactttatttcactgttaatgttgtaatgtatatttttgggaatgtttcttatgcttacgacaattgctctaggttggacaaccagaatgggggactgccactttcttttttaaaaaattaataatatcaaattccctttgataaaaactttaccagtttatagtaacaccacatatgacatttcctatttccccagacaattgccagcaatatgcaaaatgtattgctgaatattagtgtagttgtataactttttatatacttattagcattgtgtatttatccttctggagatttcttgaatatatcttgcccattttattatttagtatttattagaactcttctacaaaaccaataaagattggtgcctttattaggaaatcatgattaacaatatttgtattctgtctatgattatactgtgttttctatgtctttcaacaacagctttgcttttatagttttctagaacaatcattgaatatctgtttgatgttaattagctgatttgaatcctggataccagtactctaagtcaataaactatgataaaattctaaccgttagaatgtgcttttctttgggtacaggatcggcttaacccgaattggtaaaaattttaaagtctgttttattctttctgggttcctaggttgtttatccttcgaaaagaagcacacacacacaatatcaaaacaaagaacaatttcctgtttctaagaaaagtgtctttaaaagacatcttgaacatcaaatagttgttacaaaacattttgatgagctaagtgtaaacgattctgaaacatatggatgaaattttcctaggaatcactcgggcttaaaaattaaggaaaaaacacacaatcaaactaggtttagtgttttccaactccaaggcatttggtaaatagtccaagacaaatgacaaatccctaatatgtccaaattggcccttctttaataaaatgatgtatgtaagccgttgtataagcttcactctgttttatgtccccctgtaatagacaaaagaatgcaaaacttccctaactccggacctttttgctggaattaagtctggctctgatgacattactagtgataataaatattaagtaagtataatttataataaatttttttttctttagggaacagtgttcaaggtcatctcttttgatcaaggggttcaccaccatatttcttgagtgtaagtaaatattcccggttcaaattttactaattccagtgaatgcactgcacaccccttaatgtcttgggacagttcgaagtgggtttaaagtcatttttcccccacttgtttctaaatttatgtctggttatatgagtatttgtcactcatctgggaagttttcattacacttaaggaggaaagtgaaaggataaaccagacctcccagtgctactctcagagtaaacaatgtctcttctatctgcatagactttcagatcaagatacgagtagagcccaaaactcaaaatatatacgtgacttaatgtgttcaggatatttttgtaatgtaatgtagtgcaagagatgggactatatgtgataggacaacattggatctttaaaaaaaaattttaaagggtatgagtttggaactcttgtaaccacacaaatgtagatgtccttagtcttcagagatccccaagcagacaaactagatggtggttatttgtattaaactagcctttgttttagaaattgaatcaaccaacatgagagtttccttcaaaatatatcttataaataatgcttttcatgtatgttaaagagaaactactagtcggtttattctccagtggcttagatgtcaatcatgttctctttttttaatttatgtactctccctcctccagcccatagtaggtcaccactattacctcttcttaatttgtcctgcataccacctcaagatatagatacatcttactctcttaccctcaaaaaaacaagtacattaggtgacagttacattagtttgatttattaattccataatgtaataaatatataaaaacctcacattgtgcttcataaatatatataatttatattttttaaaataaaattttaaaaatatatagttgtatctttcttatgcataaccttaaaggaagaacatatctatttataaacattttttgactctctgtgatttcaaattatttaccctgataatcttgaccagagatgtaagatgtatatcatcatgtgtatatacacacataaacttatttgtaaaacaagaataaagagttcttaaatgtcctcctaagattaaaataacagaaacttaaagcaatgacaattgtttgaactctttaaaaatctttaccacttatcaaaacaaccaatatttatgaagcaactctatgtgccaggtattattctaaattccggggataaattagtaagcatgctcccacagagcttacagtgtaaaatactgagaggtattaatgcaatagccatacacctaaatgaaaattacaattaagataagtagccgtacataaaagatcttcatagggaagtttgatgcaaccaggaggatcagataaatttcagaacaagtaatagctaagatgaggtatacaaaaatagcagaagctaaatgatgcattgggtttgggaataggtagttgggaaaagtatcccagaccataggaaaaagcaggcacaaaggccctgtggtgggctgggaaggagtttgagggacccgaagaagttgaatatagatggatcacaatgagtgaggtcatctgtggcataaacaagattagagattaaatttgaggtgatataaatgaaaaatcagttatagatattctggctcaagagaaagggtacatgagctttaattacttgccaaaatttttggaagtcaagaagccaagcttgaatgccacacaattaatagggacccggtccagggaaatttcagaaaaactccatggtgcttaccactgagtgtttatagtcacccagccagaaggtgaaaccagaacctctgctacagttgtttctgagaagcaaagatatccaccaccttagttagcacaaaaactgcgcaaccttgcaatatcctcacagaccttcacatgccatgataaaagataggcttggtgggagccagtcacacacatttatacatcaacagcatggggacatggaacatgcaggctgggaattctacctgggaaaggcaggattgacaaaacacagaataattataatgggaagaggaggaggtatgcaaaatgtcgaggacattgaaaaaggacagatgtcatacagagatggagtctggctggagctatatatttgtgaatcattgacattgtaattaaagctgaggacatggatgagaacacatatgagatcataagtgggagatggtagaatcttctttctgtattctatttgtttgacaggctctgcattaagtgctatgtgcaaatagttcataaccaaatgtgagaaactgcttccaagcagataattgcaacataatatagcaatgctataataaagatttgtatagaatattgtagaagaatgatagtgttggtgaggcagggagcacttatgtagcaaaggaaacccaagggaacccaaatctatatctcttttgactcatttatccaactgccaaccactgattagctctggggtatttcctcaacacttcactttcaacgtgtccaaaattatacttgttatttattctcccctttccttccactaatttcttcctctttctacgattatcatcatgatcaactaccagattcattgtccaagttgaaaatctggaaatcacacttggcccccttcttcatcctccaatatccaattagtcaacatatattttaaatttcatcatgggaatatctcctgaatctgtcacctcccctggatccttctactagagccatgggtcatccactcaattccccatgtccacagatattgcagaagttttctggtaggtatctcagcaaataaacctctcctaactctgatgctggggtccacaagctttgtttctgtaaagagccaaagagtgaacagttttggctttgcaggctataagttctgtgctgtaagaactcaagtctgttcttgcaatgagagagcaggcataataatctgtaagtgcacgggtgtggctgcatgccagtaaggctttcgaagtgtgctaactcctgcttgactccagaaaaccatcagaatcatcaccctgaaaacagatcaatttctatgcctttgctattccacaattttcgtgaaagaaagcccatatacctttgccctttcaaaagatcctttatggtttattcctaagctattctaccgatttcatcttctgcctcctccatgttgtgtccggttttgtggcttgttcttatgattctgcacctttgcacatgtgatttttgccatcctcttcttcattcctcggaaaaattctcctcatctttctgtgcccttcttaaatttgagtgctctctgtcttagcattgtttccatttttcttttctagatttctatactgagttctattgcagcttggtaacattatgtcatgattatctgcttggaagctgtttcttacacttgacaaatccagcacttaacgcagggccagttaaatgtcttctgaaagagtaaacaataaatacaaaatgtgaaaatgaaacggtgagtgagagagtggccagagaggggagaaaaagagtgcagacaattcttttgaaaattctggttgataaaaaataggggggaaggtagatactttattctcacaaccataagactagctataatgagctgttttaaacataataactaagtttttaacttgaagtaatataataaaataagcacacagataaaatatggaaattttccccagcttcaggaattgagaacagtgcccaggtccacagaaccctacaatatttatttcactctgcccacctgggtgctcagttataataattctacccatgacatgtctatttaaaaagcgtactgttgaggtaacaaagccttaactcatgtaaaaaatatctggagtgttgaaaattctagcacagtggataagacatttggcccaaatgagtctatctcacagttcctttgaaattatatcgagcaattaattctgctgtaactacacttggtgctgtctttctaaaggattttgtgagggtatcatttcatactctccttctcaaggtacacaataagccctaacctggttttgcatgaaaaagtattgccaatttaaaagagtacatgctataaggcagaacaatttaccattcagcaacagtgaaaggatttgtcggtgtgtgagccatcagactcattgtcttgagcctcagggcaaccccatctatgtctcctagaccatttcacagttgtctgtagtggggagatgcttggaaagaggtaacatatctgtgcagttccaatcaaatgcttctgggcttggccaatgaaggagaagtgtctttcaacagatctgcctttggactatctttttcactcacactgttagtcattggagtggacactcctgatgccctgcccacatcctccttagaattcctgtacccttcttccacatgctgtctgtgttagctactaaagattcatagctcttctctggagaattgcccttggctgagaaggaagcactgcctaggacagtatatgtgtgcctgccctgctctcttgcctcaagttgggactgaggttattgagaaattgactctccacagcctgctgtgggatcaggctaaagtcagaacgcacatcataccacttctttgctcagttcccctccctggcctggctaaatttgccattcctgcttcctgaggacccacctttaataaatcacacgtgcctgaaacttcattcccagcctcttcctctcctagatctctctacctaggacagttgtaggtaaagtgaggaatcctaagagagaacccagaaaagcagaaatcacaaaggcaacctagtcaacagtgaaatgtatgacaaaatggagggatcttgtcgacaaacaaaatgatatctgaaaagtctcactaataaatattaaagatcattaaatgtacattaatctttggatgttgaaatcaacattgaatgtccaaaattaattcaaataattatatcaaacacacatgcacacatgtgcacacacacacactaatcataaggatttaaaatattctgaaattatttcatctttccttttctttctttcttattaaaaaaaaaaaataatggccagaatactggcttctataacattagtccctgctctggcagaccaaaagaggcagaatcttcccagcacaattttgccctccaaacattttaaaagtatccaattatctggctttgtattacttacaaaatcttgtagttatgaagaaagttcttttttttaaattcagtttatctccctaaattaaaagtgtccctataaataagaagagaagctgtttctgtcaaaactttgggtctacttaggactaatggagtttctttgtttcgtaggaaaaccttttgccctcagaccagctgctaaagttgaacaccacagatgattctttcaaagcgattctgaaaaaccatatgctggaatctaaatttcttaaactttacacacaagatcagaactccacatcttaatagccatataactctataaagaattacccctgatttctctggtagatcatcactgcagaaggaacaaaaaaaggcttcataaaagcattccacctgtattgttggcagatgacttataaatgtcgcacagacacgggctgactactggctcatagaagaagcattaaatgaacgacgagacatctgctggtaaatacacagcaaacaaaaaatgcaactcagagccaaacatgtgcacagtgtgggccccatctctgctcataaaccaagcaatgtgttctgctaatcattagcagagttattgattttagatgtgtatcacacagctataattttgtcagagagtagaccacataagttgttctttttctggttgtttcattttgtcttattccaagagtccgtaaattgacgaccgggacaaaaattataattgacatcatctgtgggaaatatttcataaaacaacaggcccagatgtaggattaaagccatgtggtagtaaaataccccactgaaaaggggccaggttccatgatttcttaagaaaacagatgtgctctttttccctctgcttgtttttcaattttttttctccaaataaatccccccccaaccaccaacgttttttcctctctgtctcctcacgattgcactggagagagttcataaatggattacagatgtaggcttgtacttcaaaattctaactgtcacaatctctggaataaaataaatgaaacatttggaaaaattacattgaactattgtaaaggtaatgatgattatgcaaacatgtctgcttgacatttatctagcatctttgggcatgagcatatgatctcccagatacctcaagctggagttcagggagtaggaagtaatttagagtttgtccaaaatgcagcaacagtaactccttctgaaagccccctgttctgaaggggaagcttttatctttgaagtttcgacaagttggtaaaagggttctcacgtactttttttcttcttaaggtgagatttctggataaaacagcacaggaaaataagaacccaatatatctcagcctctactcattcaagttccttttatctatattatgctctacaatttcccctttggaaatgttgtgaaccacaagaaaaggatcctagggcacaaacacaggctatattgtttaacaactaatctacaagtgctgtgaagaactgcacacaaccgggtttttgccaaaaaccttggtgtcatatggaatccattgcagtatcactgattacaattaattaattcagcatttatgctgtatctcagcatccacctccagtaatgtgccaagatggcttagtgttgggagaaaataataaagtgtaaaagaaactaaatttccatcatgtgtcacgttaagatttcaacagaatatctgcactctccaactgtcccttttcagcccctcaaaaactgaagcaaacagtacataaatttgtttagaaaccagaggagcctgactccaatttccctgcattgtttctttagtctgtcttcttggggttaaataagaaatagaattcaaagtaccagtgagaccccaggagacctgagctgagtaacaactcacgaagatcattttgatactcccatttcagcatcctcctttctaccagttcctcagatgcccagctcaaggctgaacacctttgtgctccatgagatgagtctgaaagagattatgctaggtaaaataaaccagatattatattattccacttttataaaatacctacacataggcaaactcatggagacagaaagtatattagaggttaccaagggttggaaagggtgagaaatggggaattgccactttttgggtatagagtgatattgctccatgagaatttatgaaaggagaaattaatagaatggtgtgagagtgaggggcaagacaaaagaggaattatgattcctccctgggcaccaaagacgaatcagaacaatgtgtatgagtctttatgactgttaaattttactgttacagagatgagagctacagataaatgattgatccatcccaaagtaagtgtgtgttcagagggcatataatagtttttaaaggttattgtggcaaaatatgtataatggaaaatatgccattatatccatctttcagtgtacaatttagtggctttagttgcattcacagtgtagtgcaaccagcaccactatctatttttaaatttttttcatcatccatacagaaattctatacccaataagtggcaatccccatttgtcagtctttctagcccctaataacctccaatatactttctgtttctatgaatttgcctatgtgtagatattttatgaaagtggaataatatggtttattttatttagcataatctctttcagactcatctatattgccacaggtatcatatgtttcattcattcttatgtctgaataatattccattgtgtgtacctaccccatttgattatccattcatccgtcaatgaatactgggttgttaccaccgttgggctgttgtgcataatgctgatgtgaaaactagtgaacaagtatctgtttttacctttattctcaattatttcacttaccttggagtggaattgctagtttatatggtaattctgtattaacatttttaggaactgccaaactgctttctaaagcagcaggacaattttacttccccatcactgccagcagttattattattattattgccatgcttgttggccattgtattttttctttggagaaatgccttttcaaataattttcccatttttcaatttgattgtttgtctttttgttgttgacttgtagggatgatttatatattctggctattaaccttgttcagctatatgatttgcaaatattttctcctgttccttaggttgtcttttcactttcttaatcatatcctttgatggatagaaaattttaatttactgaaggtcaacttaccattttttttattttgtcgttcatgcttttgggatcatacataagaatttattgccaaatccaaagacatgaggaagttcccttatgttttctttgaagagttttatggctttagttcttatacataggttgttaattcactttagtttatttttcttaacagtgtaagagtccaagttgattcctttacatgtgaatatccagttgtcccaacatcatttcatgatgagagtgcgttttgattcagattccaaagcagggtatgaggaccacagttaggggaccaaggattaaactttttatttctctatggaattccttatttatcaagtggtctgtactgacagacccctatttgatataatatctatttaattcaattgctattctattagaacaccctgttttatttattttctccactaaaacccactagagagctctgaagttatagaaccacagcagcagtgtgtttctatggtcacagatgcttgattattagagggttaagatgggggtataacatgtatagggaggagagaaactaacctgttattgatcacatggggacttggccacctacttggggtcactggctgggacctcagtagcagagcaggagagaaaggggagaaatggtctccagttctgagcttacaagaagagcaggtaaaattgggcttggcttgaactggtgagaggttgatctgatcagtagcgtaagatggtggaggtgagtagataggtgagcaacaagccactgcattgccagtaatccaccagtgtaggagggacattacagccttgagtggaaagatgaagagaggagtctgatcttacctgagagggagctaaagagaaaggtcacatctcagagaaatcattcacaccatttgcagtttagaattgagaaaacagacaaagaaactgaggcagaaaccaacacacagattgaaaaaaataatcttcagtgatcattccagggacaacatgagggctattagatcttgaacagcaagactcaatcagagcatatccagtggtggggaattagaattctttacaattgagtcagagtcacaggcactcgagcccgaacatgaagagtgctaggtctcatagccatgctgggctggcacattaggagcaagaaaaggaaggtaagccctgtggaaaggaaggccagaaaaaactgacttcctgtacccgtagcaactcctcagcctctctctccgtagaaggggcaatcaagctaaagattttatttatgaagccagcttgacatcatattttaaaattttgttgtcctgaagatagagatttcaaaaatcacgtaagtggagcataaaaaacaaagccgagaattgaaccactatagaatttgatggcattttatttcaagagacagtgccatagaaaggacaattgcaaactctatcagtggtctcatggtcatcctacagagtcatctgattatgacaccccttacagtaaggaatagttggaagcaacaaggaaagtcaagaaatcccataatgtgactctcttagacaaagtagacgagtctaaggccctaggatatggtcattcaatccaccctgtgtctgaaccagtcaacaataagaagtgtgagaaacacaaataagagctgtcaaaaaagagaaagattttcagtataagaagtggctaggctttggatcaaatgctaatgtttcattcctggtatttacttggattgtaccttatttgacgtttccttgtcagcttcagattttcaccaagtccttgcagtgcttggggagccacactgggtcaggcaatctgatgaaatgcatagatgcttcatctcacattcactggaatagatgtcttaagtacacttattgtgttagttgtgcttcatttctccaaaaaatacagaccttcatttaataacaaatggacaaaaaaaaaaaaaaaggaacgtatgaagcaggcaggacttctttgatgttctctatttcaaaatgtgatgggaagaaacttcagaggaaatatttttattttctcttcaacaatggctaaaacaatgaatagggttgagagaatttttgagccctgaatcattgcttctatgcatcaggcttccttgttcatatacttagtagaataaggcaactttattttcttgaaatgctgtttttatttcattatttcccaattcaaaccccttaattacttctctatgggttactgaaaaatggcattgaataatacattttcagttctataagaaatcctaacatacatctcatgcaattcccttttctttgacaacaggggaaactgatgctcagatagactaaaggaaaatgtaagtctcccaattcgtcagtgaggaatccaggcctagaactgcttctgtcttccaacgtcatgctctttatgtaactggatcactgcagactatatagagacccacaccatgcctctgtgctccttttcagcttcatcttcagtgctatctcccctaaattgccctccttgcaattcttcaagaaccccacaagcctgaaatatcctctctcatcttctttctgtgttcaactatcttccatgtaaagacgagcctacatttcccaagaatttttttctaagcaacacctgtctgaggaagaattagtattagttgcactcatttgtcacatttctctatctacttttgcttatatctaaaaacttatgataaacataagactgtaagaattcagaagtgttagcttttttccctagataactttatgtttattaatcactccatcacattttgaaaaatttagaatatgcttatacttgccaaatgacacaaataaatggataacattgtggattcgttctgatgtatatacataagaaatatcaacattttgcaaaatgaaagtaaaaaatatcatttcatcttttgagacgatattaacattattatagattagccattgaaaatatttttcataaaaagttaaaatggatataaataaagcgtgcctttaagagaaaggatctgagattgaaaggtgaagagactcagccaatttgacatgtagaataactgaaatagctcttgggtctttcggctttattttccccagccttccaaacttacattcataagctctttctttacagaattaggatcacagtattcttttgaaacccaatggatatgtggcaaccccaggtcaccctcattatatgttctgctaatgcctctatgttgtcctctagttgaactgtggttttgcacacagacagattccaaatggatggggatttcaccagttttactgatttggccaaagttcttagcaccagtcttgcattttaatatggcactatggttcagttcccagagtaacgaaagatgaaaatcccattattacctaagatgaaaatcagctgtacacatagtccatattttcagcagaccatttttatgaactagagccaatgtacacattaaaatctccttacaagtcgcccatcaccttattcagcaaagtggcttcatcactgggaaaaaaaaagagaatagattttgcagaagaacaggaaatgttagtgaccaaatgtattctacagaaaagagaactagagaagtgacaaatctatgaaatgattttttaaatgagtctgatcaaagatagcaaccacagagcattttttctttacatcagaaaatgaaagaataaataaaggacagtattagaatatctgcagaggttaaacaaagggaaaaatcagctctttaatcaataataaatatacctacatccactgcatctatatttgtattgataactgcatatttatttgtctagctacacaaattagagctacttcaaccacaaggctaatttgagcaaggcttccccaaggtttaactgggaagggtttaataatatttctcccatgatccatgtgatcttcacatgattaacttagtcagtgatcacatgggaatcagctgaaccttgaagaaaaaggcctaggcatgttatacagtgacagatttattggaggatattaactaacatgcctttcctcacttcctgcttgcatttgaccaacatcaactagagctgctggaggttgccttcaattgctccaaaaagaggcagagggaaaaaaaagtcagtttcttggtaagtcaatcagtttcccaacagaaaacaaatatttatagatagttttaggaaataactaatttaaaagttctgggtatggttaaagaaaccaacaaggaatgggaaagcaccaagaacagtcaggagaaagctttatgagcactagccttgtcactcccctaagtaagagtggcaagtggggttactgatactgagaatgtgctgtggccattggcaggcaatggagtcactgctagaaccatggcctgctagtgagggagcaaggcaaacagtcaccctaacatttttctcctgtgaattccaagtcttttgcaggtgtattctgcagctaaactcggtgggaagccagaggtcatggaagcacaggagttgcaatttgtagaggacgactttctgtggcaaagattaaacacagattatttttcaagagggacaaatagaacataaacgacatacctgacttttaagttctgcaacttcttttaaaaatggatttcagatttcaggttctgggggaagaaagtagacatacttttccctattcctaagtatgattttaaagcctgaatgtgatagatagatgatataatagataaatagctatacagacagatgacagctatatgttaaatagatagatagatagatatagatagatagatgatagatagatagatagatgatagatagatagacagacataagactctgaaaggtggaaagaagaatacagatgatctaaggaacacagaacaaaagatgaaatgtgatatgattttctcgtttgggggtatattttttccttgaacaaaatttggaggtgataaagctggaaaccaattaatgtaaatctgtgcagacagaaaaaagccacaacaaaaccctgttctctctagccaaagtaaaaggcagcctaatgagaccaaagataaaataaaataaaaagttttagagaatatctagtctattccagctaaacaccacagcaaatctatgcccaccccccatccccatgctggcaaaggctgagtgattaactgaaggatccaacctcaccagcctataacaaggcacctcagaactcctgctggatgatcagagaagactaagtagggaatcaaaatgttcatccctgctgattgattacaagtttcctcttttcctaccatgtcaatgaagaccaaatagggagccagcacttccattcttacctggaagtaacaaggtgtccctctgtcttcccactggggtggtatgagaggaggcccatggagagtcaagaatttcatctctgttcatcactaataaggtcatgcctccaccatggagttagcagaggccatgtggagagcagtaatgatgcacacctactctccctagccagggagcagtgacttcatccctctgcccatggccacagtgcctctaagtatcagtaactccactcactactattgattaggggagtaacaagccaagtgcccctaagacctcctgatagctgttcctgctgctttgacatcatttgttggtttcctaaaccatagctggtcctctgtaatgacggccttcccctcagttatcagtggaaatttagggagaatcctggacttctacctccacttggcagtaatgaagtggtacctcactccccacctgcccccccaacaaaagtggtatcagaagaagccagttaaaacaaaagccttaaataatatcctagtctcgtaacataatgtcttgattccttctccattcttaaaggatattttaactggaaataagattttgagttgacaattcttttctttcaatactcaaaaatgggcatcctacatccttctaggctcttgtgttttttttgagggaagctgatcatagtcccagaagacacaatccctgaacaccaaatccttaatgttgaaatcccaaaataaaataaaattctgggaaaaataattttaaaatattttaaaaatatttatttacattgctaaaagggaatttgcatgagaaacatataaaaacaacagaacatttttataggctactttatgtcataaaacaggcaataatagcatacatatttttgcaagcatggacactcagatatactaattgcagttgcacaggcaaagcagaaggagacaaactacatgtatgaataaattccttatatagttgcagtcatctgaaataccacaatggatgacctaagtcttttgatgagatcaatcaaaaactgggatggatcaccacagcatatgcattcacccaaagagatgagatcttgagaaattttatgtttcacaaatatagatgtataaaaaggatacctcttcatttattaaagaagtttcaacatttttacgtatgcacacaatgctttcacacaaactcagctttgtagtaatacaactttgtattgtcaaatttgcaacacaaatgcataaaacaaaatagaactctctaaaagtttttgcacaatttatatatccagtattggaaatgatgtaaagatgaaatacatagcatagagtgttaaaaaaaatgatgacaatttaaaatggtgaaaaaataaggcgaaaaatattaaaaataaaatgtgatatatgaaaaagtgtattgcagggatagattatgggcaatcacacagaggtaatccataagagctggctgactttcatgatgatcttatattttaaagtcttgcatcatgataaatagtggctttttttcttaaggcatggctctactttgagaatatattcacattataatacataaatttttgccagcttttatgttgttttggattcacagaaattcattttgcatggacccatatacagactacaaatttggtggaaacaatgctggtgatagaacggcagcactgatgcccaaatgtctttttatcctgccatgcacattattattattattattatttttatttttttattttttatttatttttttttttgagacggagtctcgctgtgtctcccaggttggagtgcggtggcgcgatctcggctcactgcaagctccgcctcccgggttcacgccattctcctgcctcagcctcccaagtagctgggactacaggcgcccgccactacgcccggctaattttttgtatttttagtagagacggggtttcaccgttttagccgggatggtctcgatctcctgacctcgtgatccgcccgcctcggcctcccaaagtgctgggattacaggcgtgagccaccgcgcccggcctgcacattattatttttaaaccagtcagttactttgctggtttctcaggccctggaatgtcattggctggaagaaatgacaatgctggcaaactaaagcttttgtcattgtcatatcatggtcaatgcactcatctgaattttccaccaaattcgttgcctgaatggaaagaaaaaaacacaaactttactggtaacactttgaaattcacttatagaagtcttgatcatatttaattctgaatctgtcattatggtttgggggttaaattggaatccatttgcacatacaaagtctactgatatttaccccttggttctttttatcctcactgtatttcccagcatcctagcctccatgcatcctgaatctccatgttccaagcctactctttggaagccatagcctaagaagaagaagccatgctatgtcctctttgtttctaaccagccagccctgctagatccaccagccctcttttggccaaactgcacacaactttaagtggcacaagaaactaaagggggcttctccactttcctgcccccttgtgcctcaggtttcctctctatctagatttctcctggcattatctttgccctgctctagttatcccatgtcagtatggactcttcaaagccttcttcaccacactttgtataggaaaatagggagcaagaaatacttatattggctcagaacatctctaactccacattaacagtttctactctgggagagatatgatgtgaagcccctttcgcaagcacacattctcaaactcctcttccaaatctgatcctcccacctcttcccaggaaggacttttttctcctattttaatgttaggaaaggattattccaaagatatagctaataatgtgtctctgaaattaataccattacctcttagatgtatcattgctgcagtgggatttaggatccactaagtcaaattttaatcttcagtatttacttccctttgcacttttgctattttgatcttaattttctccattacaatgcatagtccagacttaattacatgacagacagaaagtataagaggaggagagaacatgaattaatattctaaggtattattttactacatacttataagaattgcatattttttcaaatccataaaaagaccaaaactatgactcattacataccttgcagaggagagagaataagcaacttggaaagtatacttgaggaagtagtccatgaaaattttcctaatcattctagacagattaacatgcaaatccaagaaacacagagaaacctagctagacactaaacaaaacaaccacctccagggcacatagccatcagattcaccaaggtcaatgcaaaagaaataatctttaaagtggctggaggctgggcgcagtggctcacgcctgtaatcccagcactttgggaggccgaggtgggtggattacctgaggtcaggagttagagaccagcttggccaacatggtgaaaccctgtctctactaaaagtacaaaaattagctgggtgcggtggcacaagcctgtaatcccagctactcaggaggctgaggcaggagaattgcttgagcctgggaggcagaggttgcagtgagccgagatcatgccactgcactccagcctggctgacagagcgagtctctgtctcaaaaaaaaaaaaaaaaaaaatgggtggagatgaaggtcaagtcacatacaaaggcaaccccatcaggctagcagcagatctctcagaagaaactttacaaaccagaagagattaaaagcccattatcagtgtccttaaataaaagaaatccccccccccaaaaaaaagtcatattctgccaaactaagctttataagtggaggagaaatacaatctctctcaggcaagcaaatgctgagtgaatttatttcaactagaccagccttaaaagaggctcctaagagtgtgttaaacatggaattgaaagaatgatacctgctaccacaaaaccacacttaagaacatagcccacatgcagtataaaacaatcaaatctgcataacaaccagctaacaacatgacccaggatcaaaatctcacatatcaatactaacactgaatgcaaatggactaaattccccacataaaagacatagattgaaaagataacacccaaccatctgtgtctttaagagacccatctcacatgtaataacactcacaagttcaaaaatcatacaagggtaggggaggacaaggagtccttattcttgtaatagatacaacagactttagacaaaaaacaataaataaataagaaagacgatgaagggaattacataatgacaaagggtacaatccaacaagaagaattaactattccaatatatacacacccaacattggagcacctgaattaaaaacaaaaaaaaagtttttgacttatcacaaaacccagacaactatacaataatagtgggagacattgacaccccactggcaagattaaacaggtcatcaaggcagtaaactcatgaagaaactatggacttaaactagacgttggagcagttaacctaatagacatctgtagaacattccaaccagcaatcacagaatatacattcttttcatctgcatgtggaacatattctaagattggccacatgctcagacaggagaagtctccataaactaaaaaaaaaaaaaaaaaaaaaattgaaatcctaccaagcacactgttggaccacagtgtaataaaaatagaaatcaatatcaaaaagaagtctcaaaactatataaatatatggaaattaagtcacttactcctgaataactttggggcgaacaccaaaattaaggtagaaatcaaaaaagtttttgaaattcatgaaaataggaagagaacttaccaaaatctatgggatgtagctaaagcagtgttaagaggaaagtttatagccctaaacaacttaattaagaagttagaaagattacaaattaacaacctaactttgcaccctaaaggaaccaggaaaaaaataaccaaccaacccgtaagctagcagaagaaaagaaataagtaaaattagcgaagaacagagtgacattaagatgcaaaaatttatacaaaagatcaataaaatcaagaattggttttttaaaaaattaataaataaacaaagattgaaagaccactagttagattagcaaagagtgaaaaagagaagatcaaaataaaggcaatcagagatgaaaaagatgtgtaacaactgccccctcagaagtacaaaagatccacagagactattatgagcacctctatgcaggcaaattagaaaatctagaggaaataaatacattcctggaaacacacaatctcacaagattgaatcagaaagattgaaaccctgaatagaccaatatcaagctctgaaattaaatcagtaataaaagtcctatgaagaaaagaaaaattccctggaccagatagattcacagctgaattctaccaaatgtgtaaagaatttgaacaattttttttatactccatttgaaacctgttacagtcaactacctactaatctgtatttaatttgatcactgaacttattttcattattttacattaaaagaagaaagctggtgaatgtatttgaaattgaaacattaatcaataagtaaaatggatgtatttattgatgtatatttaaagtaatgtagaaaacaattacctattttcctctagccattgtaatcccaaagaaacaagtcaataatactattagagaagacaccattatactcaagatcttattgcagttaaaagattccccaaccctagctaatgtccaaattttaatcagcagtaagtatagcataaatttagggatacaggatctgagcattttattaacattagttttcctcaggcagcaatttctctagcaacaagatcatcccaaattgctaagaaattccaattttttaatctaagttcttttacaataggctttatctatcagcaaccaatgaagaaggtaaatttgcataagaatctcatgtaactggcttattgttaagtccaaatttattgaggcataagtataaacccattattttttctcccaagttctgcatagtaacaatgtaacatttttaacacaacacatacctttctgtttaagataaataattgataattcagtctaatctaattcaaaattcctatattatgtcttatgtctgtcctttcaacatatccagggtggtagagcttgtggagatagagtgtataggtgtccttgtctatgcttttacttctctaaatctaggattttggagtagagaaaggagtagtctcactttgctcttttcttccctttctcccatcttgaatcaattccaccagtcttgaggaaagggaggggggatagaaggccacatatacctacagaaagataatcatttatctctctttagtctctgcaaatgatcaacaccactttccacctctagagatcagattgcacatctcctagcttggctggtagcttctttggtagtccttttgatcctgctttgcccctaaccctatatatttcatacagaactacgagagctatagaaatcctcttccataccatctgaaagccaaagggatatggtatgtgagttggagttgcggagggaagggctcctctttttcccaggcataacaagcatggtcattccccatccctctgcttttcgctaaccacgcaaggcttcagcctttagagagccaaaaatgagacacaggaatacatctctacatttatgtacctctaaaaatcaccagggcatacatggcaatctctccatagaattttctcaccataactcattctaatgacaatactagagtaggctagagatcaatctgggaaaaaggggtgcagtttatgcagatatgctctatttataaggtgattcctttgaagtcctgtcttatttgatttgatggaatgcagcaaggaaatgctgttcttgcataaacattgaactctttatgactataacaacatccttttcctctccttcctccagtaaattgattggagagaaaggagaaggaaactggaaaataaggaataaagacaagaggtgctgggataaaagttgggacagcaaagaagatccagttgcctcttactaaaacctgaatagcatgtccagtaccaattattagtagttctctttagaatgttgaaatatttaatgcatttaatgtctccctgatttcagcttggggattgagtcgccacaaattctaactatagggaaagtctcatttaatctttcgatagtggatagacccaagttttagaagcagaaaaaaaaatgtttatacatttatattctgttactcctccctccaattcattacctctttccaatgcaaaaggacccccactctattcctctgtaatcttaccctatgtttttgaattgtctttgtttggagctgatttgtcatacatcttttaaagatcaagttatttgtgacattgtgaattatgtcagatgacattacaaggaatttaatttaaatgtatgctcctctgagtgagtgagtaggaatcatctcgttcttaaatgaaggtcttacacagaatggaaagagaagaatttgtaaattaatgtgtttctttgtttttattttttatttctttttggaccattttatattcaaaatgtcttctgtcacattttctctctcttctctttctgggacaacaattatacatggtagtccctccttatttgcagttttactttccatagtttcagctacctatgacaaaccatgtttcaaaaatattaagtagaaaatccccgaaataaacaagtcataagttttaagttgcgtgtccttctgagtagtgagatgaaatctcacactctccttctcagtctcgtccaagacatgaatcatcactttgtccagcatagccataccatatgtgctacctgcccattagtatataaaggatgaataatccttatgtgaaaagatttggaccataggtggatttggatctatattcttttgaattttggaatatctccaatatacttgttagttgagcatccctaatctaaatatccaaaatccaaaatgctccaacgagtattcctttgagcatcatgtcagtattcaaaaggtgtaggattttgaagcgtttcagatttcagattttcagattagacatacacaatttatagaaggtttgatactatccatggtttctgccatccacaggggctcttggaacatatgtaccccaataagggggactactatggtcagagctggaggagaagagaaagaaataattatttactatatttcacaagtcttatatcttttttcatgtattctccacttatgctctcttgaatatattaattttagttattttaaaatctttgtcagctactgtttatttctggatcacctctgggtttgtttctagtgtttgtttatttttttcgttgctggtcataaattatgattcatatattttaaatatagaagaaaaggtgaataatatgaaaagtaagaggaaatgttttagaagagtattaaaatctatgaaaataaaattggaattatcaaactgaattatacaatatttagtcaaaaaatcaatatgagtataataataaatcagacacagctagccacccaaaaaatcaccacttggtgcctggaaattaaacaatatccttctaaataacttgcagatcaaagaaaaaacaaaattttaaatatttattctgaaaaaaagataaggttggatatgtcaaactctaagaatagagcaaagcctgaaatgcatatattagaggaaaacttcagttttgagaagtttgaatatcaaacttctgaaaacagaattccagaaaataaaattcaaatgaaatgaaagaaagaaatgagtaaagtaatagtggaaatccataaaatacataataaaactaaatattcactagaaaaggcaacaaatcaaaaattgtttctctgtaaagagtaatgaagttgaaaaaatctgaatcagactgtttatgagagagactgacagaatagaaattgctattataactgaaaagagggacaacactacagttcttattgacaacaaaaacataattataggtattagaaacaattataccaataactttgacaattaagatgaagtatataaattacttgaagaagacaaattaacaaagctgatacaataaaaaatggaaaacaatttttaatgtgcttgtagccattttaaaaataatatttgttatccaaaccttatacaaagaaatttcaggcccagggggaataagagattaattttcccagacatttaaggaagaaataatatcaatcttttacaaatattttaaaaggaaagaaaaagagaaaaatacatctcagctttttatgagaggcagcataattttgataataaaacctaataaagacattgtaagaatggaaaactacagattaatctctctcaccaacattgctggataagatctgaatagatacattattagtgcaccaaatgcaattgtatgtgtgtaatcattatcacatgggagttaacattcaaaatcaaatgtaaattgtaacagtcagatatcaaacaatgttattgttacattttgagaaaaaaagatggaaacagttttattatttctatgggtgcagaaaaagcatttgtagaattcaatcactcatttaaaaatttaagtaattacttaaaacctaggaatagaagagaatgtcctccatgtgatcagagatattcacagaaagcccacaataaacacagatgaaatatttaaagtattttctctaagttagaagaaaaacaaagattgccactgtcatcaagattttcaactctgtattatgaggaccagccaatgaaataagacatttgatagatggatagatagatttataaagaaaatgatggcacacatacaaaataataatctagcataagctattacattaataaatttagaaggatcaccaaatataagaccaatataaaaaattaattggataccagcaacaacaaataaaaagtaaatttaaaaaaacatgctttacaatgataccaaaagtataaatttctgggaataaatgtaatgaatggtaaacatgactttatgctaaaagctgttaaatgttgaggcaaattaaataacattgaaataaatgaagaaatatagtaataaattatgtgacttagtatcacaaagatgtcagttctcttcaaattttgtataattccaataaaaatatagatttttttgatggaaattaaaaagatgattataaaacttatatggaaataacaaatgaattggcatattcaagacaatattgaggaagaaaaaagcatggatttatactatcagatatctatacttactataaagctatagtaattaagacagtgtagttactccaacaaaaagaaaaaaaaatagtgggagaaacaaagagagtctagaaatagaaccacatgtttatagtcactcaatcatgtcaaagacagcattgcagtacagttggtaaagaaggacttttcagtaaattgttctgagtaaataatctatacaatatgagaaacataagactggactcctacctcacagcatgtgcaaaaatttttccagattcattatagaactaaacataaaaataataatacttttagaataaaacacaggataagaaatctgtaattttagaaacatttttataggacaataaagcactaaccataatggagattgttgatgaattggagtctatcaaaaggaagatccattcatcgaaacagaattgacagactaaaaatataagctagatacaaggagaatatatgtcaatgaatacgctttataaaaggtttagatccaaaatctattaaatacttctacaagtcaacaaagaagcaggcgacacattaaaaaacaagggcaagcatcaatcaatgagtggaaaaagaaactctgatacacacacacacatatatatgatggaatactactcatccataaaaaggaatgaattaacagcatttcaatgacctaggtgagactattattctaagtgaagtaactcaagaatggaaaaccaaatattgtatgttctcactcatatgtgggagctaagctatgaggacgcaaggcataagaataacagaatggactttggggacttgcagggaaaagtgggagggggtgagggatagaagactacaaatatggtgcagtgcatactgctcgggtgatggacgcaccaggtcctcacaaatctccactaaagaacttactcatctaaccaaataccaactgtatccaaataacttatgcaaaaatacaatttaaaaaactgggcaaaaatatgtaatatatactttataaaataaatcatccaaatggccaataaacataataaaaggtgtccaatatcattagtcattagatgaattaaatcaaccatgcacctactagcaaagtaaaatgaaaaaagcagaaaataccaaagtgtaggaacagagcaattggactttcatctaatatatagatataaattgtacaggcaccttagaaaactacttggcagtatttaattatatctcaacctaagtatacttaaatttctcttctaggattatacccaaaaagcatgtatacatacaatcgctaaaatacatatataaggatgttcctaccaacattagtatagtagatagaaaattaaaacaatcaaatgttaagtaccacagcaaaatactatacagaaattgaatgaataaatatcccaacataatgttattaaacacagacacacacatacacaagaacttgtacttctgatttcatttatatgattgcataatcaacttattcttgttggtaaaatgaggatagtggctatctttagaaagaagagtgagtatagtgaataaaagagaataccaggtgggcttataggattctggtttctttattcatgtgatgattacacaagggtgtgtctaacattttatcagtctgtacatttctgatttgtttactcttctgtatctataaatgttaatttaacaaatccaatttcactctgtgaacattcagttatacattcttatttgtttgtttatgttagttgctgcaattaatagagtgcataaaacattctttaaataataagggaaaatttaaattaagagaaattaaatttttgaattttatttcaaaaattaatacgtaaaaatttacgttttaaaattaaatttaaaacctaggctggggatggtggctcacacctataaattcccagcattttggtaggccggggcaggaggattgccagaggtcaggtgtgcaagatcagcctgggcaacatagtgagatgccaactctacaaaaaatttaaaaatcagccaagtgtggtggagcacacctgcagtcttagctactcacggggctgaatttggatgattttctggatcccaggagtttaaggctgcagtgagctatgatgatgccactgctctccagcctgggtgacagagcgagagcttgtctcttaaaaaaaaataaggaaaatgtataactggaataaatgttaggaagttaagattcatggtgttgtaagtttataaaagaaggacttcatgtaggaatatcaggaagaactgctctgagcaagtgataaagtgcaatttgacaaatgaaggtgtggtagtaggttgaagaggcaggacagcatactagacccagcgaccagcatccttaaatattcaataaaggtcaaagggtgctgaagggaaaagtggtgtattgtgtgattgaagagataggtagggtccagattgtagtttgcttaaaaattttggtcttaaccctaagagcagttgggagcatgtgaagatattgtagaagacagtattatataatcagatttgtattttgaataaattcccctatgactcagaatgagagaaggccaagagcagatgagataagaccctataggaggctactgctgtagtatgggattcttatatcatgggttaaatgggtaatggaggagaaaatatataaatgtctttgttaccactcaacagtacacataaaaatggtaaagatagtaaactttatatgtatattttacctgaatttgtaaaagtatagatgattttcagttaaaaaatatagggtggtagtaggagaaatagagagaaatgaaaggatttgagatctatttggaggcaacattgacaggatttgctgatatgttgcatgtagggggtgagcttgatggaggtgtcaaaaataagtcccatatttctactagtggatatagaagtctggggatttagttcactaagagaggtaacattaaaatatgacctagctttgaggaagaaaacattaattttcttgggaatgtgttcagtttcctttgggatatgttcagttcaacctttcaggcataaattaaagatgtccaggggtcagttgtgtttaggaatttggagctcagataaaccttccaacataataaaatttaatataatttagtgcattttacttgtcaagcattgtgctttacctatcataactcatttgttctgtagaactctatgttgttgatattgctgttaatattattctcattttccagactagtgaaaagaagtgcagaggttacctaccctgcccaaagctagtgtctggagatgttcaaatacatgttgcctagctccagaagatatgccctgaaacactaatatactatgtgtctgaatcacccaaaaaatagaaaacactttcttggcattgtagtaaaccctaatcaaatgtaacatcataaaaattatctcaagattcaatacatggaacactgtccctcaaactatttcttccttcacaccttcaagtttgtgcatcttgtctctcagttctggcataaagaatgatttcacctccatgggctgtgcttgttttcataacccttgttcttagcatatccatcattctggtcctgtctgcatcatcaaaagagaatgcagccatatcttgaatttactgccagtcctttctcctgttttctttgaaagtggaaggcatttgtttgtttgtttgttttttcacaatgctatggattttttccacttagaacacttataatctgtaattttaatgggatttggagatgttaacaagttttctgtactagcttgaaccatcttaatgcattaagattccttgggccggatgcagtggctcaagcctgtacttccagcactttggaaggccaaggcaggtggatagtttgagctcaggagcttgagacgagcccaggcaacatggtgaaacctcgtctctaccaaaaatacaaaaaattagccagctgtgctggcaggtgcctctggtcccagttactcaggaagctgaggcaggaaggtcgcttgagcctgggaggtggtggttgcagtgagtcgatattgtgctactgcacactccagccttggtgacagagtgagaccccatctcaaaaaaaaaaaaaaaaagattccttgatggacaatttataaattgtgccccaaaaccatgattctgtgtgactctaagtccaaaaatttgtaattattgaatcaatatgatgaaattaattttaacacttccattcttattgaggaaggaaagattgatttccaaaaatcatacctaactaaaagaggtcattttcttatgatttctgtttccatcccattttaggttaacattcatcatcttttcccccatgttcattcccacttggagccacagaagaaggaaattttaaaaaatactttacgtcatcactgtagcagattcctcataatacggtatgtatccatataatttctcaaaattttaattcctggaggaaatggagcaaagtgtctgtatagaactttacagtgatcatctttccttcaggaacattaaattgaacaactatccacacaataaaacaccttcataataacaaaggctcagatgagcaatcacagtaactggattaaacattatatcacagcaagaggcactgaagagggtaggacagtcttgaatctcctataccagccctcccccacccaccagcagtggaacatcatagggagagagaatctgtgtgcctgggggagggagagcaaggtgattgtaggactttgcactaggactcagcactgccctgtcacagtggaaagcaacacagggcagaattcagccagcactcaagtaggaagcatttatactagccctagccagagtgagattgtccatcctagtagttggaacctgagttctggctagccccaccaccatgggctaaactgctctggggttctaaataaactggaaaaacaacgtaggctgcaaggacttcaatttctggttttgcgtttggcttgaggccggtggacttgggatgcatgtgagccagtgagacaccagccccagtgacaaaaggaatgcatgcattactctgcctccaactcttaagcactgaaggtcacagctctgggagaaaagggaagagtaaagatgactttctcttgcaactaggatactagctcagacagtaaaataatgcatcaaccagagctcaaagaccccattcaaggccatagctcacggacaatatttcaagacccacctgggccagaagggaacccatagtcctgaagggaagaaccaatgcctggcagaatttaccatctgctgactaaagagccattgggttttgaataaacatcagcaataaccaatcggcaactgccatctcagctgcggtggccatgggaagatattcattctgcttgaggaaaatagaaggaaaagtaaagaggactttgttttgcagtctggataccagtacagccccaggaaaataaagcaccaagcagattgctaaaacctctgatcccaggccctagcttctggatggcatttctagacccaccctgggccagaagggaacctgctgcaatgaagggaaagagccagtcctgacaagacttatcatctgctgactacagagcccttgcgacatgaataaacattagcagtagccaggaaatagtcactacaggccttggacaagacccattgctgtgctgatgtcaggtgtgatccagcacagtctcagcagtggtggccacggaaatgtttttgttacccctccaccaactccaggcagcttctcacagaaagagagagacacaatttgtttggaggaaaataagggaagagaacaacagattctgcctgataatccaggaaattctctaggatcttgcccaataccatcaaggcagtacctctacaagtctttaaaaattgtggtgttactgagcctggactgctccttaatacacatacagctgctatgaccaaggactcaggtcacaacactcaattccttttgaatacttggaaagccttcccgagaaggatgagtacaaaccagcccagaccatagagattacaataaatatctaactcttcaatgcccaggtatcaagaaacatccaaaagcatcaagaccatccaggaaaatatgacctcaccaaatgaactaaataaggcaccagtgaccaatcccacactgatagagacatgtcacctttcagacaaagaattcaaaatagctgttttgaggaagcataatgaaatccaagataatgcagagaaggaattcagaatctaatcagataaatataaaaaggaggttaaaataattaaaaagaaccaagcagaaattctggagctgaaaaaatgcaattgacaaggtgaagaatatatcagggtttctaaacagcagaatagttcaagtgcagtaaataatgaatgagcttgaagacagactatttgaaaataaagtcagagaagtcaaaaaaaaaggaataaaaaatgatacaccatgcctacaggatctagaaaatagcctcaaaagggcaaatctaaaagttatgggcctcaaagaggagatagagagagagattagggtagacagtttatttgaatggataataaaaaagatattttcaaacctggggaaagataacaatattcaagtacaagaaggttgtagaacactaagcagatttaacccaaatgaaactacctcagtaatttgacaattaaattcccaaaagtcaaggatcctaacagcagcaaaccacaccaccacccgcccccgccgccaaaaaaaacaaaaaacctctataaaggaaatccaatacgtctggcagtagatttctcaatggaaaccttacaggcctggtgagagtggcatgaaatatttaaagtgctcaaaaaaagttttttataatattgtatccagtgattatatccttcaaacatgactaataaagactttcccagacaaacaaaagctgaggaatttcatcaacaccagatctgtcctacaagaaatgctaaagtgagttattcaaactgaattaaaaggacattaatgagcaataagtaatcatctaagggggctgggcacagtgtctcacacctgtaatcccagcactttgggaggctgaggcaagtggatcacctgagttcaggagttcaagaccagcctggccaaaatagtgaaaccctgtctctactaaaaacacaaaaattagccaggcgtggtggcgggcacctgtaatcccagctactcaggaggctgaggcaggagaatcccttaaactcgggaggtggaggttgcactgagccaagatcacaccattgcactccagcctgggtggcaaaccaagaatccgtctcaaaaaaaaaaaaaagaaagaaaatcatttaagggtacaaaattcactggtaacagtaagtgcagagataaatacagaagattataacattataattgtggtgtgtaaactacttatatattgaaaaagaattcaaaaaactataaaaataaaaacgataactttaaaaaatatagacagtatcataagacataaattgaagcaacaaaaagctaaaaggcaagggggtgaagtgtagtttttgttagttttctctttgcttgtttgttatttgtttttgtagagttaagttgtcatcagtttaaaataatgggttataagatgctatttgaaagattcaataaccttaaatttaaaaacctacaaaagatacaccaaaaatataaagcaaaaacttaaaacaccaccagagaaaatcactttcacaaaaaggaaaacagaagagaaggaagaaagaaaataccatgaaacaagcagaaaataaataacaaaatggcagtagttaagtctctacttacctgttctgtaaatggactaaactctacattcaaaagacagagtagctgaatgcatagaaaaataagactcagcaatctggtgcttataagaaacacacttcacctataaagatgcgtataggctgaaaataaagtgatggaaaaagatattccatgcaaattgaaatgaaaaaagagcagaagtatctacgtttatattacataaaatagatttcaagacaaaactataaaaggagacaagataattctataatgataaagggattaactgatcaagaggatataaaaatttaaacatatatgcatacaacactgtagcaaccagatatataaagcacatcttagagctaaagagagacagaacccaatacaaaaaaagttgtagacttcaacactctactttcagcattggacagctcatccaaacagaaaattaacaaacaaatattgaacttaatcttcactacagaccaaatgaatacactaaaagaatacacattcttctcctccatatgtggattactctcaagaacagaccacacgttaggccacagaacaaatcttaaataattcaacaaacttaaaattatatcaagtatcttctctgactatgaaataaatctagacattcatagccagagcaaattgggaaaccataaaaacacacggatattaaacaatatgatcctgaatgaccagtgggtcaatgaataaattaaaattgaaatgtaaaaatttctggaaacaaataaagtggaaatgcaacataccaaaacctatgggataccgtgagagcagtgctaagagtaaagtttataacaataagtgctcgcattttaaaaaagtagaaaaaaattcaaatgcacaaccaaataatgagtcttaaagaactagaaaagcaagggcaaaccaaacttaaaatcagtagaagaaatgaaataataaagatcagagtagagataaataaaattgaaaaaagttacaaaagattactgaaatgaaaagttggttttgtaaaaaaaataaacaaaatagacaaacctttagccagagtaactaagacaaaagagagaagggccaaataaataaaatcacagatgaaaatggagacactagaactgataccacagaaattcaaaggatcattagagagtagtatgagcaactacatgccaataaattggaaaacctagaagaaatagataaattcctagacacatacaccgtaccaaggttgaactatgaagaaatccaaaacctgagtagaccaaaaacatgtaatgagaacaaagccataataaaaaaaaagtctctttgcaaagaaaagcctgagacttttcttacgtagaatacactcctgaattctaccaaacatttaaagaagaactaatacaaaatctatgcaaaatattctgaaaaaaatagagaagaaactacttctgggcttattctgtgcagtcagtattatcctgataccacaaccagacaaagagacataaaaaatactacatataggctgatatctctgatgaacatgatgcacaaattctcaacaaaataatagcaaatcaaattcaacaacacattcaaaagattattcatcacaaccaagtgaaattcatcccaaggaatcaaggctggttcaatatacacaaaacaatcaacacgatacatcatgtcaacagaatgaagataaaaccattcaatcattttaactgatgaggaaaaaatattttataaaattcaacattccttcacaataaatgctaaaaatattgggtatagaagaaacaaacttcaatgcaataaaagccatacttaacagacctacactagtatcatactaaatgaggaaaactgaaagattttcctctaagatctggaacaagacaaggatgcccactttcaccactgttattcaacatagtactggaatactagctagagcaaccagacaagagaaggaactaaaaggcatccgaatgtgaaaaaaaaaaaagtcaaattattcttgtatgcaaataaaatgaatttatatttgtgaaaacctaaagactccaccaataaactcttagaactgatatgcaaattcagtaaagttgcaaaatacaaattcaaaatacaaaaatcagtagcatgtctatatgccaagagtgaacaatctaaaaaagaaattaaaaattaaccccacttattatgttgataccaaagtaattgtggtttttatcattgaaagtaatggcaaaaaattgcaattacttttgcatcaacctaatacaatagccacaaataaaattaaatacctaggaattaaccaaagaagtaaaaagtctctacaatagaacctataaaacattgatgcaaaaaattaaagaaggcacaaataatcaaaagatattccatgttcatggattgaaagaatcaatattgttaaatgtacatactgctcaaaacaatctacaaattcaacacaatacctatcaaaatgccaacaatattcttcacagaaatagaaaaagcaatcttaaaattcatgtggaaccataaaaagcccagaatatctaaagccatccttagcaaaaagaacaaaactggaggaatcacattacctgacttcaaactatattacagaattttaataaccaaaactgcatggtagtaacataaaaacagacacacagaccaatagaacagaatagacatctcagaaatcatacatcttcagtgaagacatttttgacaaaggtgccaagaatatatattggggaaaaaacagtttcttcaatacatggtgctgggaaaactagatatccataggcagaacaatgaatctagacccctatctcttgctgtatacaaaaatcaaaccaatatggcttaaagacttaaatttaagacctcaaactataaaactactaaaaaattgaggaaactctccaggtcattggtctagtcaaagatttcttgagtaatatcccaaaagcacaggcaatcaaagcaaaaatggacaaatgggatcatatcaagtttaaaagcttctgcacatcaaagaaaactatcaacaaaatgaagaggcaacccatagcatggaagaaaatatttgcaacctaattatctgacaaggggttaataaccagaatatattaaaagctcaaacactcaataggaaaaaaaggtaataatccaattaaaaatgggcaaacatctgaatagacatttctcaaaaaatacatacaaatgacaagtgtatgaaaaagtgctcaacatcactgatcatcagagaaatgcaaatcaaaactacagtgagaattaatttcatcacagttaaaacaacttctatccaaaatttaggcaataatgagtgctggttacagatgtggagctccataatggctgtactaaataacatttctaataacagtatacaaaaattacaacagttcaccttgtgcactgttggtggaaatgtaagttagtagagccattatggagaacagtatggagtatcctcaaaaaacaaaaaatagaactaccacatgatccgggaatttcacctcctagatgtatacccaagggaaagaaaattagtattttgaagtgatatctacattctcatgtttttttgcaacactattcacaatagttaaggttcagaatcaacctaagtgtccatcgacagatgaatggataaagaaaatgggagacatatatacgatggagccataaaaggaatgaaatgctgtcattctcaacaacgtggatagaactgcaggacattatgttaagagaattaagccaggcacaggaagataaacttgttgtcatgttctcactcatttgtgggagctaaaaattaaaacaatcgaactcatggagatatacagtagaatgatggttaacagagagtaggaagggcatgactggggggatatggggagggttaatgggtacaaaaacatattatagctagacacaatgcataagatctcatatttgatcttattcataacaaggttgcaaaaggtgattagagtcagaaataatttttgtacattttagagtaactgtggaagtacaattgcaatgtttataatacaaataattgttgaatgtttgaggcgacggacaccccatttaccctgatgtgattattacacattgtatgcctgtatcaaaatagctcacataccacataaataaatatatatatatatactatgtacccataaaaatataaaataaaaaacttttcaattccacatgatatctgagatgatctttttttctgttagtcttaatgctttctctgtgaagtggtgagctgggacttgtcaaagtcttcatttggatgaaggaagatacatgatatgtttatattaccaagagacccaagtagactccaaccagcagggacgataaaagcagaatccagagcctcatgattttttcatggtcattgcatttccagctcataatttagatcttaatctcctgggctagcctagaaaggaaaacttgctcaaagctttcacaacttacattaatttggatttcccaagaagcagaccttcagaaaaaacatttgtattcaagccatttaatattaagatctaaggaaacatgaatagtagagcagggaactgactcaaggaataggaggcagtgaataaaagatattctattaatccatttatcatagtggtaactagagcttcacccacagagaaactctctctcccctttcaccaagatgtgaaggagatggggagatggggtgtttatgtgttcacttttagtcattgattctttactgcttccatggatattaatcccagagtacttttgatctgccactcatacaggcaaaacagacttcacagttcctgaagggggaaacaatatcacacaaagagatgcagatgccagcagctggaaatcaactgaagcacactaacagatccaaagaatataaactggtcactgacaacaataacaatctctctaaagttaccaagagttcttttataagttcaagccctgtttggagaattaaagacacatcccaagtgctgacaccaagtactattataaactatttgacctttcccaagactcttgctaactcctagaacctaatacactgcttaaggtctatcctgcaaaagcaagtatgtattgaaaaatatcctaaaacacttactgaagagaagtgtgtcttaagtactgtgtaagagctgtctccattcacaaagcatatcctagtaatctactgagaattgatttgatttattatttcaacaaattgacaattaagataaatcaacaagcacaagtataaacaaattatgaaaggaagtacagggaataatataaaataaacttttctggtatcatttttaaaatgtcaagttgaggcactaacttgaacatgggacctatacttcctagctttactgaggtacaatgaatgaattttatgaaattttaagaattagctttcttctctctgctatcttttctcccatttacttagtcccttctccttttggagtattttccataatctaaccagaatgttaatctggaaattttccagtgttcatttacaggtcacatttgcagattttggtttgatttgtaatattaggaaaacaaaacagtcactcaacatattcatttctaacaccagatccttcagtggctgccaactgggtattctacaatgacctcaattctgctactatctacttggagaccagcagatctctggttaagagctcaatccctcaaactgctccccacttcaaggccaaacacaagccccaagtgtggcctgcatttctgactgactattcatcagagttttcacatctcctactcaagtttaattaatttgctagaacagcttgcagaactcagggaaacactatacttatgtttatccatttactataaagaatattatgaaagatacagatgaatagccggctggaaaagatacatagtgcaaggtataggggtgggtgtgctgctgtgcacagaatggagcttccatgtctttattccaaatcctgtttctgagtatctatgaaggcttcattatgtaggcattactgattaaatcattaaccatttttgatcaactccactttcattccctctccccttcccagatagtgtagattaatactgttattgcatgaaagtgttagttattgtggaagtgggttcctaataaaagaataaatttggccccctttcctctcttgttcccttgccatgtgatgcctttccccatgttctgatgcagcaagaaggccctcgctaaatgcaacccccttcactttggacttttcagcctccagaaccatgagccaaatacatttctattgcttataagttacccagccatgttattctgttatagcagtacaaaacaggctaagacatcagatacacagtttgcaaataatttcttccattccataggttgcctgttgaccctattgattgtttgctttgctgtgagaaagctttttagtttgatgcagcctgattttttttctagtctatacttttggtgttatagccacaaaatcattgccaagactaacgtcatgaaactttccccccaagttgtctgctcagtatcactaatcatcagggaaattcaaatcaaaatcacaatgacatatcaactctcacctgttgagatggctattattaaataaaacaaacaacaacaacaaaaatctacaactagtcttggcaaggatgcggagaaattggaacccttgtacacagttggtggaaacgtaaaatgctacagctgctgtgaaaaataatatgcaggtttctcaaaaaatattaaaataggactaccatgtgatccagggattccacttctggatgtttatccaaaaaaattaaaatcaggatctcaaaaagatattaacacttccatgtttaccgcagtactatttacaatggtcaatatgtgggaacagcctaggtgttaattgacagatgaatgtattaaaaagttgtggtatatgcatataatgaaatattagatagccttaataaagaagaaaatcctgaaatattcaacaacatcaatctttaggacattatgctaagcgaaagagtccaatcacagaggacaaatattgcatgatttcatttatatgaagttatctaaaatagtcaatctcataaaagaaaatagtagactagtggtagccagtggccaggatggtggtatgtagaggtactaattactgggtataaaattttagttatacaagataagttctagagattttctgtagaacattgtttctatagataatactatattgtacttttaaaatctgctaattgggtacgtacctcgtaaagtgttcttgccacaattaaaaagaaaatctctacttgatttgctgcaatattcactctgaagatccctcagaaacccaaagtgtataaaattattaacaaaaatgttctccgggaaaaaaaaatctcttgctttacatggaacaataaattgtcctcgttcgcaactaactgcttctaggcatccctggatttcgatgaaatctctaaggtaacctcttcagaagataccagctgctttttgtctcttttggaatttgttacataatggctgccattttggaggagatcccagaggcattgttttggttaccaaagatgtgcctccttcaggaaaaggaaacactctaatttaactatgtatcttgcattaaagatagttgaagcagaacttctttctgaatacaaaatgaagtccattagctactcatttcaagctgacttgagtctttcaaatttctattttaatgtgaaacacatttctgaacgttattgatattctatttatgttttgaattctatataagtttctaaaagcgcaaaactgctgtgaagtatctctttttcttaggtacatatttgaaaagcatgcaggggtcagaggaataaatttcatgggtccttctctgaaagatttcaagggaaattcttctctcaaatatctgaatagtcggaggatgtcttagccagaatataatcaatgaacatgacataaaatgatagtcaaattttctgtaatatcctgaagagaacaatatgatataaaactaaattttaattctttatagaaatcatattacaaaaggctgtgttatatatctggtattatgaaaaataacagaattttaaacagaatttttaaaggcctatgcaatattttacctgaatgttccactggcattgcaagttcaagtttgaagtaaaattaacaatcttcactgtgaacatatcattacttctaaaaataaataaaacaatatgtttgtgaatctatatgtttatttaagatgtcaatatcctttcaattacccagactgagaaagttggaattatgttttacttttttctctttcttggcccccaagccaaatgagcttcatgaccccacaattctagtctgcattaatttgtacaatatttttctcttatttatttcattgctactgctataattgaggtattccttatttcaaaaaaatttaaaacgatatttttattgtggttcattataaaaaaaagtgtatacttctgagaacatttgtacaacatagaaaagagggaaataaaataattcattttcacagtcaagaattaagggacaggtattatgatagttaattttctttcagccctgtgtgtgcctatacagtatttttaatgatagtataatattacatactgtgagtgtgccaacatttatttaaccatttccctattacaggaccattaccctttatagtctatgttgttaaaattgacaatattatacatgcaaaatatccacatctctatttatgtcccatatctggatccctagaagtagaataaattgataagaacataaactattttattacattcttttatttttaatttctactttctttaaattgtttcttttgtttttctgaagaaaatagttatacatctagaatttactttggtgtataatttgcgtcttttttaaagagtgaaattcttctgttttttcagtaattgttttttatgacattttgtatattatgcatgtatttattaacggtgctattttatgagtgtcttagtccattttgtgctaatagaatacctgagaataccttatgaggaacagaaatctatttcttacagttccggagcctggtaagtcaaaggtaaaaaacctgcatctggtgagggtcttcttactgcagccccacatggcagaagatggaaggggtaaaacctactcctgcaagccctttttatagtggcattaatccgttcattaagacagtgttctcgtgacctaagcatctcccattaggccccacttccaaacactgttgtagtagggattacgtttctaaagcatgaattttgtagaacattttagaccacaaagcatacagaccttgagtagacatttgagttagttgatctgcctgtccattattaaaaacatattgcatcattttgttgatatttactaaaaatatgttttagtatttggtaggaaaattatcttcctaatttgttttttactatttaaaatactttctcatttatttacttttccggattattttggaatccttctgtcatgtatagggataagaaaaaaattatattaagaatttttttgaaagtagactttagtttttggagcagttttaggttcacagaaaaactgagcagaaaacacagagttctgatataccaactgtacccataaatgtacaccttccctcaccatcaatatcctgcaccaaagtgaaacacttgttaaaatcaattaaacctacattcacacatcattacccaaagtccatactttagagttcattcagagtgttgtacattctatgggtttggaccagtggataatgacatctaaccaccattatggtgtaatacataatagtttcatgaatctaaaatcttctattctctgccttttcattcctgcaggctctctgaccccttggcaaccactcatcttttcactatgtccgtagttttgccttttccaaaatgtcacatagttctaatcatgcagaatgcagccttttcagattgccttttctcacatggtaatttgtattcaagattatttcatgtatttttgtggattgatagctcatttcttttcagcactgaaaaatattccatcgtctagttgtgtcagtttatttatctatccgtctactgaagaaaatcatgattgcttccaagttttggtaattctgaataaagttgctataaacattcttgtatcctgcaaactttctgaattcatttattatttctaataatttttaatagaccatgtagttatgtaaaagatcatgtcacatatttttcctcttctctattgtatttaattctgctataatcttatttccttctttctgcttgctttgggcttagtttgctctttttttttctagtttctttcttttttttttttggactgaaccatattgtattcaccaacaataaatgagagctcctgttgccacacacccttgccagcatttagtatatcagttttttggacttcagtcattctaatgggtgtgtagtggtatctcattgttgttgttttttaatttttattttatttccacaggtcattagggaacaggtggcgtttggttacataagttctttagtggtgatttgtgagattttggtgcacccatcacctgagcagcataaattgcaccctatttgtgtgtagtcttttattcctcacccccttcccatcccttccctctgataccccaaagtccgtggtgtcattcttatgcctttgcatcctcacatcttagctcccacttatgagtgagaacatatgatgtttggtttttcattcctgagttactccacttagaataatagtctccaatttcatctaggttactgcaaatgccattaattcatcccttcttatagctgagtagtattccattgtatgtatgtatatatatatatatataccacagtttctttatccactcattgattcgtgggcatttgggttgattccaaatttttgcaattgcaaattgcactgctataaacatgcatggacaagtatatttttcatataatgacttattttcctctaggtagatacccagtagtgggattgctggatcaaatagtagttctacttttagttctttaaggaatctccacactgttttttatagtagttgtactagtttatattcccaccagcagtgtagaaatgttccatgttcactgcatccatgtcaacatctactatttttttatcttttgattatggccattcttgcaggagtaagatggtatcacatagtggttttgatttgcatttccctgatcactagtgatgttgagcattttttcatatgtttgttggccatttgtgtatcttctttaaagaattgtctattcatgtcctcagcccactttttgatgggattgtttgtttgtttttcttgttgatttattcgagtttattgtagacattggatattagtcatttgtcagatgtatagattgtgaagactttttcccactctgtgggttgtctgtttactctgctcactgttccttttgccatgcaaaagctctttagtttacttaagtcccatcgatttatctttgtttttattgcagttgcttttgggttcttggtcataaaatcctggcctaagccaatgtctagaagggatttttccaatgttatcttctagaatttttatagtttcaggtattagatttaagtccttaatccatcttgagctgatttttaaggtgagagatgacgatccagcttcattcttctacatgtggctagtcaattatcccagcaccatttgtttaaaagggtgtcctttctccactttatattttcattgatttgttgaagatctgttcactgtaagtatttgagtttatttctgagttctctattctgttccattggtctatctgcctatttttataccagtaccatgctgttttggtgacgatggccttttaagtatagtttgaaatcaggtagttgatgcctccaaatctgttcttttcgcttagtcttgctttggctatgcaggctcttttttggctccatatacattttggaattgttttttctaattctgtgaagaatgatggtggcatttcgatgggaattgcactgaatttgtagattgcttttggcagtatggtcaatttcataatacttattctacccatccatgagcatggagtgtgtttccatttgttcatgtcatctgtgatttctttcaacagtgttttgtagttttccttgtagaggtcttttacttcctttgttaggtatattcctaattattatttttttgcagctattgtaaacagggttgagttcttgatttgattctcagcttggtcgctgttggtgtatagaggagctactaatttgtgtacattaattttgtatctggaaactttgctgatttttaaaaaatcagttctaggaactttttggaggaatctttatagttttccaagtaacaatcatatcatcagcaaacagtggcagtttgactttctctttactgatttggatgccttttatatctttctcttatctgattgctctggctaggactttcagtactatgttgaagaggagtggtgagagtggacatccttgtcttgttccagttctcggagggaatgctctcaatttttcctcattcagtattatgttggctgtgtgtttgtcatacacggcttttattatattgaaatatgtctcttgtttgctaacttcccttgtaattacttctagacctatttttatttagaagtatgtttttaaatttccatgtatttgtaaatttccatgtatttgtaaatttctcaggcttttgcttttatgtctttctaatttaactgtattgtggccagaaaagtttaattttatcccaggtctccatatacctaattttttgtctaaattttcctcaaagttcttgctgaggttctgtagtttagatcaatctgtgattttattgtctcagctattaagcctattattactataatcatatccagtcttcactgaaccataagtagtcacaaaatatatttcctctttctattctgttcactattcaatccactggtaaatcataattcaatttttctttctgaacagggcaatcagcttccgtatttcagtcctaaaatgtatcaatagctcttcacagccctaaccaaatactctggcattcaatgatttttaacaatatggaccccagcttcactttgtgctgtattatatattctttctcttcacacaatttccactggagtggagctggatccctctttgtctttctaatatacttaagattcattagttttcttcccaataaatggtcctcctgcttatgaatccttgtctatgtcttcccttcctgctgatatgggtttctccctccatcttttaaggtttaaatttcattattctccaagaccaatgcaagacccattactatgggttcttattcgattaccatccaacatctcctcattcttttgaagttttatggcatttatttttctgttgccattactattttctttcactaattttccaagtgtggacatagcatcttctcatctagatcgtgaactgtagatgcaaaggtggcggaaacttcatttgtacttgttattgagaagatactgaatgtacatacatttcttaatgcttatatctattcaacaggtagtcattaaatatcaacaatctatgaggttacccactaatgaaaaatatcttgactaatattctccaagtgttttgatttgtggaactattgctccaagtttatttttaatatattttttcttaacaatttcgctgaagtataacaaatgaaattcaaaatctaatcccatttacagcagcatcaaaaataaaaataaaaaatattgggacaaacccaaataaggaagtaggagatttgtacactgaaaactataaaacattggatggaagaaattttaaaagacacaaaatggaaaataatctgtgttcatggactagaaggcttactattattaaaacgttcacactacccaaaacaatttacaaattcagtgatatccccaacaaaatttcagtagtatttttgagaaatgtaaaaatgaattataaaattttatagaaatgtaaaagaccaaaaataacaaaaatgatcttaaggaagaagaaaaaacaaagcttcttgtacctttcaacaatattatttaatttttaattttttaaatttgtgctcattcatagtgtacatgggaaagttttacatgtatataatgcatagtgatcaagtcagggtatttagggagttcatcgcctgaatacaatatatattttttagtacagtcatcttactctgctatcaaacattgaatgtatttcttctatcttactgtgtgtttatatcctttaactcacttctgtctaccttccctcattccccacttacccttcccattctgttatctatttttccactctgtgtgtgtgtgtgtgtgcgtgtgtatatatatatatatatatatatatatatatatatatatggaattgtgtgtatatatacacaatagatatatatataattcatatatacattataaatggaattgctctttctatatatgtatatgcagatagatatatagatatatcacatatcacattttctctatatattcatctattaatggacactaagattgattccaaattttgcaattgtgaatagtactgcaataaacattcaagtatatctttgataaacattcaagtatatcttttacttcaaagtatatctttgatgtattgatttatttgcctttgggtagatacccactagtgggactgctggattgaacggtaatttttagtcttctgggaaatcttcatactgtttgcaatagtggctatatttttttatattctcactaacagtgtatagtagttaccttttctctgcatccttaccaacatctgggttttttttgttttgtctttttaatatgaaccattctgactggagtaagatgtttatctcattgtagttttaatttgcatttctctgaagattagtggtgttaagcgttgttgtgtcactgtcagccatttttaagtcttttgagaaatgtctattcatctcctttgcccactttttaatgggattatttgtgtgtgtgtttttttcctgttgagttgtttgaattccttgtatattctggatattggtttattgaaggatgaataatttgcaaatattttcttccattcagcaggttgtctcttcactctgttgaatttcttcctgctgtacagaagcttttaaggcccgtttatttgttgtttctcttgcactaaatttattgcctagaccaatacccagaagagtattctgcagattttcttctattagtgttataatttcaggtcttatgattaagtctttaatccactttgagctgattttttatatgatagagacaagggtccagttttattcttcagcatgtggctgtacaattttcccagcaccctatattgaaaaaaggtgtcctttctccaaggtaaattcttgttggttttgtcaaaaatcagttgactgtaaatgtgtggtttatttctgggtctctattccattccattggtctatgtgtcaatttttgtagcaatactaagctattttggtgactgtagccttgtaatatatgttgaagcagtaatgtgattcctacagcattgtcctttttcctcaggattgctttggctattcaggctcctttttgattccttatgaattttaggaatttttttctatttctgtgaagaatgacactggtattttgatatagaatgcattaaatttgtatattgttttgtgcaatatggtcatttaaatgatagtaattcttcctgttcatgagcatgggttgtttttccatttctatgtgtcctcttcaatttctttcatcagtgttttgtagttttttgctctaactaggacttccagtattattgagtaggagtgctaaaagtctgcattcttatcttcttttctgttcttagaggaagagttttcaactttttccattcatagtgatgttagctgtgggtttgtaatgtatggactttattattttgagatatgttccttctatgcctagtctgttgagagttttatcatgaagtgatgtttaattttagcaaatgttttttctgcacctattgagatgatcatattttttctccttcattgtgtttatgtgatgtatgatttcaaatttattaatttgcatatgtagaatcatccttgtatttctattataaattctagctgatcgtggtacataatctttatgatgtgctgtttgattctatttgctagtattttgttgctggtattttgcatttttgtccatcagggagatgggcccgtagttttctttcgttgttgtgatcttgcttgttttggtatagggtaatgctagcctcatagagtgagttagggataattctcctatttttgattttttggaatagcttcaagaggatttgtattagttcttctttgcatgttttgtagaattcagctatgaatccatctagtcttgggcttttctttgttgggagacattttatgattgattatatcttgctgttaattattggtctgttcagattttctatttcttcctgattcaatcttggtgggtgatatgtgtccaggaatttgtccatttcctcaaggctttccagtttgtcattgtatagttattcataacagtctctgatgattttttgtatttctgtggtatcagttgtaatatctccattttcatttctcattttatttgagtattctctcttcttggtggtctacctagcagtttatcaattttgtttatcatttaggagaaccaatttttcatttaattgatcctttgtattatgtttcagtctgtacatcatttagttctcctctgacctttattgtttctttcatctgttaacttgtggtatagtttgttcttgcttttctagttccttgaggtgtattgttactgttaatttgtaatctttctacttttttgatacagacattgattgctaaacttccctattagcactacttttgctgtaatttcacaggtattggcatgctgtgttttcatttttatttgtttcaaataaaacaattttttgattactgtcttaatttgttgatccaatgattatttatgaacatgttttttaatttccattttttatagtttccagaattcctcttgatattggttactcgttttattccattgtcacttaagaagatacttgatatgattttgacattttaaaacatgcttagacttgttttgtggcctaacatatggtttgtcctatagaatgtttcatatgttgatgaaaagaaggtatattttgcagttgttggatagaatattctgtaaatgtctgttaaatccacttgatctaaatttcagcttgggaatgactttctccttcatttgtgacgagtaattttgctgactgtgatgtccttttttttttccttgactgtgatgttcttgggtggcagtgtttttttgtttgtttgttctttcagcactttaaatatattgtttcattctcttcttgcctgcaaggtttctgctgagaaattcactgttagtctgatggagtttcctttataggtgattcaatgcttttctcttgctggttttagggtttgctctttaacttttaattgaaacagtctgattataatgtgacatggggaagaactttttgctctgtatctccctggggattattgagttttctgtattaaatgcctaaatctctttctaggcttgggaagtttttacctattattttgttttttagatttctaatcttttcttttttttctttgcccttaagtgtactgataatttatgaatttgtccaccttatgctgtctcaaatgtcatgaagcctttgctcacttgttttctctttatttttgtcagactgtagattatttaaaaaggcctgtcttcagttctgagattctttcttctgtgtgatctagtataatgttgaagcttccaaatgtatttcttatttccttcaattaattcttcagttccagaacttctatttcgttcttttttaaaatgtccatctgtttggtaaatttcttatctgtatcctgaattgttctttttaatttctttgtgtaatttttcaaaattgtcttgtatctcactgaacttctttaaagtcaatattttaggttctttctttaatctgtttttttttagagacagagtctcaatctgtcacccaggctggaaagcagtggtgccaatatagctcactgcagcttcaaattcctggatcaaacaatcgtctcacctcagctttccaagggactgcaggccactgcacccagacaaaatgaatattttgaattttgtacttgaaatttcaaaaactcctttttgactaagatcctttgctggagaattattgttcctttggagatgttgtattttattggaaactttttcatgtttcctgtgtccttatgttgttatctgtgcatctagtataacaatcacttattcccatttttgaatttgttttcataggggaggactttttcaggaaaatgtgtttgttcagtagggtactttagttttgtctctgggagaaaacagtagtgtagtctctgtatggttgctttgctgtaaacagtgttattggtatctgaattcttcaggagtttaggctgcattcaatagtggaggttgtgatgaataactggaataaatcccatgactcatggcatataattattttcatatatcattagattcaatttcccaatattttgttagaaatttttgcatctgccgggcacggtgtctcatgcctgtaatcccagcactttgggaggccgaggcgggtggctcacaaggtcaagagatcgagaccatcctggctaacacggtgaaaccccgtctctactcaaaatacaaaaaattagccaggcgtggtggcgggcacctgtaatcctagctactctggaggcagagactggagattggcgtgaactcaggaggtggaggttgcagtgagccgagatcgcgccactgcattccagcctgggcaaccgagggagactctgtctcaagaagaaaaaaaaaagaaatttttgcatctatgcttatgatacatattgtgtgtgtgtgtgtgtgtgtgtgtgtgtgtgtttccttgtaatgtctttgcctgattttggtattagagtgatgctggcctcctgaaataaattacgaagtatctcctttacttcaattttctgcaagagattatagagagttgctaaactctcttccttaaatatgtgataaatttcacctgtaaactcagcatgacttgacattttcttttttggaaaactgttaattattaattcaatttttatatatatatgtattcatgttatctatttccttttgtgtacgttttggtaaattatgggtttttttgttttgttttgttttgttttcttttgttttgtttgagacggagtctgtccctgtcacccaggctggagtgcaatggcacaatctcggctcactgcaactctgcctcctggattcaaacaattctcctgtctcagcctcctgagtagctgggattataggcacccaccaccacacccagctaatttttgtgtgtacatatatatatatatatatatatacacacacacacacatacacacacacacatatgtacacacatatatatacacacacacacacacacacacacacatatatatatatatatacttttttttttagtagagacggggtttcactatgttggccaggctggtctcaaactcctgacctcgtgatccacccgccttggcctctcaaagtgctgggattacaagtgtcagccaccgagctcggccataaattatgttttttaagcaatagtttcatttcatttaggttatcaaattagtaggcatgaagattttactctttttatgtccatgggatcagtggtgatgaactctatttcatttcttatatcagtaatttgtatcgtctctatttttttcttcattataccagctagaggtctattaattgtattgatcttttcaaataatgagtctttagttttgttgatgctctctattgttttcctagtttcaatttcattgattgcttctctaatttttattatttgttttcttctgcttgcttcattttttttttttttttttttttgagacggcgtctcgctctgtcgcccaggctggagtgcagtggcgggatctcggctcactgcaagctccgcctcccgggttcacgccattctcctgcctcagcctcccaagtagcgggactacaggcgcctgccactacgcctggctaattttttgtatttttagtagagacggggtttcaccgttttagccgggatggtctcgatctcctgacctcgtgatccgcccgcctcggcctcccaaagtgctgggattacaggcgtgagccaccgcgcccggccgcttgcttcatttttaaattgctttttttttagtttcctaagttgcaaacgtaggttattcattttagatttttttcttttctcacatattcattcaatgctataaattttcctcacagcactgttttcactgtatgccacaagttatgataagaggtattcttatttagttcaaaatattttaaagttttcttgagatttcttctttgatccatgtgttatttagaagtatgttgtttaatttctaagtattttacaattttccagctgtatttctgttattgatttttagtttaattccattgtgagctgaaagcaaactttatacaatttccatctttaaatttgttgacttgtgtttatggccagaatgtagtctatcttggtgaatgctgtatgtgaacttgataagaatatgtgttatactgttaatgggtaaaatattctataaatacctcttatatatatttataaatatatagtctgttataatatatagtagcagacagtgatgattataatatactatcataagaaacttaggtcaagaaggaagattcatgggtcatatagttttattgaagaaagtattaagaaatcaagcaattgcacttctgcgtgaagaatattttgggatattataaaggaacaaagagaatatactttacaaggccagtggcattcaaaataagacttaaaatacaatagaaaataaccaagaaagattggagagaagattgtttcagtcttacaggagagtgtctgggaaagctctaaaaccatagcaagcatggtaaagtaaagaaggtgaaagaggtgaaaggagttccctgagactggggtggtgtaggatatcagtcagggtgttgggaaaaattgtagaaagatgcaaacctttttggaaggccgggaggttttacaaaatcttcggaaaaggatttggctgaaggcagccagattctattatcaggtgcctgcaaacttaggtcagatggcaaggagatgtaaagaaactcatctaggtaatttagtttactcaggccttggaacctggcctttaatcgtccttgtgcaggactgctcttttgggagggtggggggtgaccatgttaattacctgcaagtgtgttgactcaaggcctttgtcatcaaatctgtactgaataaatgagagcgtggccgacctggcaggatggagaaggcagtggctagaaacagggttagggaagaaatctggaactaagtcattctatgtgtaatggaaagctgtttatggttttaagtgtggaagtgatatgctctggtttaactttgagtagataattctggctgctgaagaaaaagtggattggaggtgaggatacatgggagtgaatagctgagctattgcatcaatagtgcaaggaacagttgtgggggtggtgatctggacagggacaatggcagcagtgacagtagacttctccattatatcttattaccttgaaacagttcttcatggcctttgcggtagtttgtattttccacagatggctgcacccacatgtcccatgcttcagagtctttccaacgtggcctcatccctccctcattaagaggtagagcctacttgtcctttcgttaaatctggttggccttagagatgtgcttgacaaacaggtaacagaagcgatttcttggacttccaaagttaggtgataagaagactccagcttgagtctcttggaatgcttgctttttgtgacactccccctcagaacccatgccatgctgtaagaaccccaagacaggtggagggtttgcactggcactgctagcgatagtcccagctgaaatcctgacagtcagcaacaactaccagccatgtgagctagccatcttgaatgtttagtccatatgtgtctctgttgtcatgtgactatactgcatgagagacccagcaaaatacctgtcccacagaacccagttaactcccagaacatggaatgacaataatcaattattattttaagccacgaagacttggcatgctttgttccatggcaacgaataatcaaaaatgcctttaacacttgccatgatcacatcttaccctttctatccaaatgtactcctcacatttccttgcttcttaatctgtggcaaatcaaccataatttggcttattttaccaagtaattcttcttattgaagttttagtagcaaaacaccaaaggctgtagattccccaaggaagctctttttttgccaatcactagatagagaaacaaaaccttcacttctgaaaacaacaatactgaaagaattatatttattaattatgtgtttctggtgtacatcttaattctcagaataaggtatttgattgctttatcttgatttacttatacttctcattatgaggcaagagtcagctaaattaaaaacacaaaagtaagtacaggaaacctcactaggaatgaactaaattacgaaaatactccaaatatttgaagcttaatatccacaagttaggccagtttctttacttacttgatattccatctaataccatcaaattcctctccaatttgagagaaatgttgacctatatctaatgcaattatatactcttcatctagttatattcatctaattatatgatacctaacattattgtccaaattcaatcctcttgttgttttgttgttttgttaaattgaaaacacataaattgttctggaaaagagaggtgttttaaaaatgtaagcccaaatttgcataaccaattgaggattgaaggaaactccgtaatccgagtaagacatgcacaccctactttattaagtttccaatccccacttgctgacccttcttaattccttttcctgctttaattatgttaataactcttaccactaccaaatattttatgtgtgttatttattttatatcaattattgtttgtctacccagcctccctgtaactgcaatgtaaactccataaaggcagtattttgtctgttgctattattgctttgttcctacttcttgaatggttttagacatatagtgggaatctaataaatgactgctaaataaatgaataaaaaagctattgcaaaagaatgtaagcaaacgcagatgacagcctgggaaacatatagtattatgttgtggagaagagattaatctcactaatatgaaaagggtcttacaaataactaaagtcaatatataaatggaaaaataggtacatgtagcctgaaaatagaaaagaagtcaaatgaccagtaatcaaaacatacaaagtaaaacaacaattacacacaatatttacataggtaatgatttaaaagaaatgcatacctaaagtacatgaaactaaaaatgaaaaatctgtttgattgcaaggagaaaacataaattatttgaatttaggaaacattggaaatatggataacaagtattaagaataggtgtacacttcgatgtacaaaaacacttcttgaaatttatcactgatatgcaaaatatgtaggcagaatggagacataaacaggaagtcggtcccctttccctctgaaactcagggtcaggcaatgttaatgaactgttagaaaactaatgagggtttatatctggaaaataatgagaaaagagagatgcattgatacagggtgttataagagcctgaaattgggatttgattcactttggatgaaagacaatgctttcaagaagaaattattttaagcctgaaatattaatacaaacatctttagaagttaaggcaaaagactatggtgattaaatctacatttgtgaacatctattaagtgtcaggcactgtgccaagaactgggcctaaaatgatgaatgaggccgtcatggagttgaccatgatcatttccgcatctagtgggggattattttggcttggggggcaggtggctgttgagataaatttagacatgttttggagcattatacaatggccttgtcaattaatttgactggctgaaacaataaaagacaggaatcctagataacttttataatttcagctcgccactaggtgaatgtgtaccatttactgggatgtgaagacaggctttattggggaaaagaaatatgaaaggttctattttagacatgtcaattttgtactgtctctgataaatgtaatagaagttaacaaatagtcatttgtctaagagtaaaaagaggttaaaaaaagataagcaaagaacaccagattgtctgtataaatctagaagatgcaagcatagtgttttataccataacactgactaattaaagctaaagacaacataaaaataggaaagcgaaggaaaaattaaaatgaagagaacatgagaaacagtgagtggaagaaaagagagaagtagaaaagggaaataggagaaaattaaaaggaaagagaattaacaaagtcaggagtaattaatatacttggagtttagctgccagcagaaacgaagtcagtaaaggagcaagggaaaatgagtcaaatgagtcagcaaaaagagagagggcaacgggctccaaagaccagttgccagaactgaccttacatggagaagtagaagaaggtgaggcatcagcttctctgctttcatagaagtaaagaagataggccaggtgtgcgtgtgtgtgtgtgtgtgtgcgcgcgtatgtaagtttctgcctggcagagacttgcaaatctctttgggtgcattgtcttctgatggctcctatattctctatgaaatgtgaggatcagtcatctgctgagagcatagaaaaaggtagggggagatttagaagtctaaggaggttaaagattttaaataatcaatgagtagaatggggaaatatggccaaacagaaaaatttgagagtctatgtgagataattaatcacaaatatttagtgaatctaattttctctgtcatgtgctattttactaacagacgctatttacaactaagaaggggtagaagtaagataaaaattaaataatgttggatttgtgtcattttagtgcgatgaataatatgtaggaaaaatacagtgatttaatttactgacaagagttatattgatttgtaaactatatgcatagagaattatataatccatttttttataaaatgaaactttaaaatctgtagaaatattcatcaacaaaagaattacatatacttaaatacacaatacaaacgattattacacagtgacttaaaatgctgatctttttatttattgacatggaaagatgcccaggatgtatggttatgtatgaagcgcaggcttccaaagtgcatgtggagtattatttactttactttgatttaaaaacaattattttgtatcaagtgttggaagtatgtagagcatctgcaagtctcatacattgccagtgaaagtgtgaattattacagttattttggaaaactctttgacagtgtgtattaaaaactcaccacatgcatacccctagaaaccaccaattgtactcctaagtatatgccaaacagaaacatgtccgtaagttccaccataaggcatgcactagaatttcatagcaacaatatatctaatagccccaaacttgaagcaaccaaataaaaaaatgattaaatgaagtctggtactttttttttttttttttttccgagacggaatctcactctgtcacccaggctggagcgcagtggcaggatctcggctcactgcaagctccgccccctgggttcacgccattctcctgcctcagcctcccgagtagctgggactacaggcgcccgccaccacgcccggctaatttttttgtatttttaatagagacggggtttcactatgttagccaggatggtctcgatctcctgacctcgtgatccgcccgccttggcctcccaaagtgcagggattacaggcgtgagccaccgtgcccggccccgaaatctggtacatttatacaatgtaagtatatacatcaacaagtataagcaaattacatggcacataacaatattaatatatcttacagtcctaatgttatgcaaaataagccaacataaaagaatatacaatgtgtgattccttttatatcacattcagaatagcttgggtgatggatgcactaaatctcagaaatcaccagtaaagaacttatccatgtaacccaagaccacctgtaccccccaaactactgaaacttttaaagtcaaggaaatatactacttgtgcacaggggtggtgatgggagggcttctgaagatgttctgcctctagaatatttggtcactttctacatgtatgctgtgctttaattgtaattacataaaaatccttctcattcatagaaaaagtactgaagagaaatatatcaatatgttaataattatgttatctgtgttataagtttattggtgatttatattttctacattttgtttcatgtaaatttttaaattgaaaatacattaattttttaatgcagaaaaacaatgaagctctttgcttttccaacaagtgtgaactctggtttccggaataactacactaaaattatgaggttcatatttcatcttcagataaaaagacactacatcttcaaaaacttgtgaaaaactgaaaatgaaaattaatatctattcttattttagtgagttatcagcctttgaccttaaaattttaatttttttacatatttaaaaatttcgcctaatactaaaacaaactgttctactgtttctggcattaactcttaagtagggcagggaacatctattaaaactggtaatctcctgaaattcttcactgtgaactcattttcttaaacacctacttatatttcaccactaatggaattggagaggatactccaaaaaatgcccaattattgttaatcccctcctttcccatgcaagtcatatcaatctcgttgagtgtttttgttcccttcacagtgcaatggtttatttaacaaaatgcatatggataagctttttgctcgaataaagctcaagaggatggaattaaattagtttggggtaattatttataattagatattcgtaatggaaactgaataaatcctaagttattctaacagcttgcttaaatgtgctgcctccgttgaccactccccacttctcttccccatatggaaacaagaaaattgctttctagctttcaaggcagtattccatctgctcaggaaaaaaacccaaggcacattcaaaaaaactttgtaaagtaaacattatttgccactcaactaaagaacagctaagtaaaagctgaaaattaagattatgcaaatatgactgtcccttaaacttccctgagaagggtgaaaaataagactcaatgctacagtaaatgtgatgatctgtaagtgagattatctgttatctatttagttagacacctgggtgtgagtctcttgaaaacccatcaggtgtcagtccacagtgctgggcagaaaatctagccataggtactggcccagttccatgagggtaccttgtgaaccacagagctctgtgagcaatgtggtgtctagtaggccgtgccaagtggaccacatctgttttgaatcaaggatgtcttcacaccaagggggttgaagagatagccaaagacataagcagccagcacccctataaaatcaccaagacttcgatttttatctttttctcatcaaaacagcagagaggttaacttctccaattgacagatgtgtaaaaggctggtgcaagaaaatgcctgacgtgctttatgaagctccatagcagaagaatgttttcatccctaccatgtgaaaaattgaagcttaaatgacttccatatggggaattttgtgttactccatgcgagtccctggcttttgtcttctacatgccattgctccttaaattcgatttattcatttggttaaactctttttgtgaattccaggtaatagattcctctggattccaatacaatgaaactttttatcaaatagctttaaattagaaagaaaaaaatttttatcagagtagatcaaccagggatttggatttgatctgagatgttctgtgactgcacttgtttaactatcttacatgaaaaaagatatatgacgtatacaccatgatttgattcatggtatagcgtggatcatgccatgatccatgatgtagcaatgtgtatctttgggccacagttaattttgtttcgggcttaatacatagattaagtttgtaatgcatccactgtctctaaaggaaaaatcaaattgtaaatcatatcctgatatgtctctaaattatacctaaaaataataggaattggtgagttaagtgaaggaggtataaaaccatcattcaaatattaattgagtactaattagtataagaaacttgcacatatactttcttcagctgcaaagtaggtatcaacaccctcttttttcagagaaggtcgctaaccaatatacttaaattaatttgtccacagctatagagcaataaatgacggaagaaggttaaaatcatgacctcatttcaaagtccattttctggtcttatgccatatctagagatacctagatcctaaaataataatgcatggcactttctaaacatgcccacaaaatctttgataccccttctgttaagaggcgggatctctgtttccttcccttgaatctggtcgtaactcagtgatgcatttacaatcaataaaccacagttgacatagtattatatggcttctgtgactaggccaaaaacaccctgtggcttccaccagattaaacagtctgctccctctgaaagaggtcagccaccatgaagaaagtctgactgctctgagattactgtgatggaaagtctctggtactctggctgacagtctggccaagccccgaagccaataccaagaatcaactatcagtcaagttactgagccatcttggaggttcaattcagttgagcttcaggcaactgataccctaggggacagctcactgcaaccacatgagagaccccatgaaagagtaacctagccaagcctttcctgaatttcttaaccgtaaatgagtgagcaaaatgaaatgattgctgttttatactactaaatttggggataattttcatacagcaaatcaatcaaaatacaagacaagattcactaagcatttaggcaatgaggcatcagcaagagatatgggggacctctgagtctctatccaccttcactattcaataagcagaactcaactatggcacaggagataatatgagcacagccattaaatcagacaaacatggatgtatcccaacattgacacttactagctccaatgtggcctaatcaaggtaatatccagggttctctatagaaacataatgtatatatatataatatttatacatatatatcttataaatctctttatatatttatataatatgtataatatctatttaggtaatgtataatatataaatatataaatatatttattataaggaattggctcacatgattatggaggctgggacgtattaagatcttcagtaagcaggctggagacctagaagagccagtagtggagttccagttccagcctgaatttgaaggcctgagaatcaggagagccaatgatgtaagttccaacctgaaagctgacattctcaagagccaagaagagccaatgttttagtttgagtctaaagaaaggaagagacctatgttctagctcaatcaccaagcagaaagagttctctcttaagaccaagtcaactttttgttctattcaagtttttgactgattaaataagagaaactcacattgagaaagccaatctatattactcagtcttacaaatcaaatgttattcacatgcaaaagcgtctacatacacacgctgagaataatgattgaccaaaatttccacacctggtggcccaaacaggttgacacataaaattaaccatcactaaaatattggcctataattttgttttcttgtaatatctttggtgactttggtgttggggtaattaatactgattataaaatttattgggtaatttcctcctgttcaattattgtatgagtttgtgaatgattggcattaatttttccttagatatctggtagaatatacatcctgggcttttgtttgtggagagctttttgattactgaatcaatctctttacttattattggtttacctatattttctaattcttcatgatacagtcttggtagattttatgtttacaagtcaatattccttatgaacttaaatggaaaaatcctcaacaaaatattagcaaagcaaattcaccggcacattaaaaaaagattatacatcatgattaagtgggttttatctctaaaatgcaaggatgttcgaatataagcaaatcaacagatgcgatacatcatattataagaatggatgataaaaaataaatatcaatagatgcagaaaaatcattagacaaaactcaacatcctttcgtgataaaactctcaacctattaaatacaggaataatgtagtttatcagaataaaggccatatatgacaagcccacttataacatcatagtcaaccgtagaaagctgacaacttttcctctaaaataaggaacaagacaatggtgcttactcacatcacttctactcaacatagtactcaaaatcctagccagagcaattattcatcaataaaaagaaataaaaggcatccaaatcagagaggaacaaataaaactgtctttgtttacaaatgacatgatcttacatatataaaaccctgactactccaccgaaaaactgttaaaagtaataaacaaatttagtagtgtcgcaagtgttgcaggatacaaaatcaacatacaaaaatcactaaagttttatacaataaacaagctatcttaaaaaattaagagaattattttatttacaataacattttaaaaatacttaggagtatatttaactaaggaagtgaaagtgatttacaatgaaaaccgtgacactggtgtaagaaattgaaaaagacacaattaaataaagagatgtcatgttcctggtttggaaaaattaatattattaaaatgtgcatcctacacaacacaatctacagattcagtgcaatccctaatgaaattccaaagtgatttttcacataagtagaaaataatttcttaacattcatatgggaccacaaaagacccagactagccaaagcaattttgagaatgaagaataaaactggaggcatcacactacctgatttcaaaacacactacaaagctacagtaatcaaaacgaaatgatactagcataaaaacagacatagggaccaatggaaaagaacagaaagcctggaagtacgttcatggattataaagtcaaatgaatttggcaaaggtaacagatgtacacaatagaaaaatgatagtttcttcaatatacggtgttggaaaaactatatttacatgcagaacaatgacattagaccctgtacaaaaccaactcaaaatgaattaagtacgtaaccataaggcttgtaactgtaaaactactagaaaaacaacagggaaaaagacttcttgacattcgtataggtaatgagttttagctatgacccccaaagcacacgcatcaaaaccaaaaatagacaactggaactacatcaatctataaagatgttgcatatcaaaaaaaaacaataaacagagtcaagagaaaacctatagcatggaagaaaatattaaatgggactgaatatacctttctcaaaagaaaacatccaaatggccaagaggtatatgaaaaaatactcaacaacacaaatcatcaaaaaaatgcaaaaaaaacacaatgagaaattatgcagcactattcacaaaagcaaaagtgtggactcaacataagtgtccatcaacagataaattgataaagaaaatgttgtatatagatacgatggtatgctattcacgtgacgaaaaaagaataaaaccatgtcatttgtagcaatgtggatgaaactggaggtcattatattaagtgaaataggccaggcacagaaaggcagaagccacatgttctcactcatatgtggtgggagctaaaaaagtttatctcatggagatagataatggattgttaggtaccagaggctgagaagagtatgtgggtggaggggagaatgaagagttggttagtggatacaaaaatacaagttagaagaaatgagccccaatattcaataccagagtatggtaactacagatagcaacagtgtattgtgtatttcaaagtagctagaacagaggacttgaaataccaccaacataaagaaataataaatactccaagtgatggaaaacacaaacaccctgacttgatcattgcacattatatgcatgtaacaaatattcacatgtactcgttaaatatgtaaaatattttgtatcaataagaaaataacggctatagtaaaaaaaagaagacaaaagataacacgtgttgacaagaatgttgagaaaagaaaatgcttgtgcattgtcagtgggaatttcaattgtttagccattatgtaaaattgtgtggaggttgctcaaaaaattaaaaatagaactaccatatgatccagcaatcccacttttgggtatatatctaaagaaaataaaatcagtatctcaaagagatatctgcacttccatgttcattgcaatatcactcacaagagccaaaatatagaaccaacctaagtgtccactaacagataaatggataaagaaaatgcagataaagaaaacattgtatacatacatataatatgcatataatatgtaagtataaaatggaatattattcaacctttaaaaagtaggaaattctgtcatttgtgacaacatggatgaacctagaggacattatgttaagtgaaataagcccatacagaaagacaaatactgaataatctcacatatatgtggaatcaaaaagagtcaaactcatagaagcagagagtagattggtggttgccagaggttggagaatggaagaaatgaggaggtgtctgaaaaagtaaaaaatttcagttatgcaagatgaataaattctggagacctaatgtatggcatcgtgactatgatttttagtacagtaggtgttaaatgttcttaccacaaaaaaaaaaacatgtgatatactttgcatatttgttccctccaaatctcatgttgaaatttgatctgcaaggtcagagatggggcttggtgggtgggattgtttgggttatggaggtggatccaacatgcatggctttgtgccatcctgaaggtaacctgcagatctaattattgaaaagagcctggcacctccctcctctccctattgctaatctctcttgccatgtgacatgctgactccctttaccttctgccatgagtaaaagcttcctgaggccctcaccacaagccaagcagatgcctattccacactttttatacagcctgcaaaactatgagccaaataaacttattttctttataaattacccagtctcaggtattcctgtatagcagagcaagaggaactaatatactatatgaggtgataaatatgttaattagattagttgtggtaatcattttacaatgcatacaaatatcaaaatgtcacattgtacacctttaatatagacagtttctatttgttgattatacctcaataaagctggaaaaaacataagtccattccttctcaaatgggtacctatattcatctccttaaacctacctaatatccaaataaagacaataacaaggttataattccacctgatacaattctccatacaactaaaaacacaccagcctctttttcagaagaggagataaagtgcttgagtatttacttttctcttcgatatcccataacttatatttgcattacgataatgcaaaatattttttaaatactatgtatttaatattcaaatgctatttaaatactatgatataaaagtgaatacatcttacgttacatggtaagagaataagagagaaaagatatatatatatttatagacatacatgcatataaatacatgcaacatattgacaacaaggtaagagggatatgttcaacaactacagccctcctttctgtaactggtcacacagtcacagctgttatttataacagccttcctctactagccactctgtatttcctttgccttcagaaaatcctttatctagttctttatctggtggagttacccaaactccagatgaagggtgtcctcaagggcctgagacattaataatcctgccttgatttcaatgctatagtttcccattgaccttaatcatagggcatggtaatactaagaggcatccagaagaatctactgtattccagaaatattcttccatgcctccattgtgtagtcagtttctccttggtagtcaggatcaatcgtctcagccagcagagtaactcccttctttgcctgttgatttagaggcagcaggaaaccaaagtccctggacaggagtcttaacttccacttcaatagagtcactgttttgtctcctggtggaaatgtctcctccctttggaactaaaatatttaggctagcagatcataaagtcatgaaaacagaaagcaaaaattttgcaagtgggtcattaagggtcatagtgagtgatgccattcccacttgcaaccctggactcatgaacactggctatgggagaaaccacaccatatattggatgctgattgagaccagatatatagccttctggagaacttgccccagcccagcaaggcattgtcatgtacctagtactgtaactgagtcttcaaaagatcattctacagatttaccaatccagctgcttcatgatggtggggaacatggtaaaaccagtgaattccatgagtatgggcccattgccacacttcatttgcagtgaagtgggtgtattgattagaagcaatgctgtgtggaataagacaatgtatcagtgaaaaagacagtctgaaaattcatagacggtagttttggcagaagtattgcatgtagggaagagaaatttgtatccagagtaaatgtctatccaaataaacgcaaaacactgccccttccatgatgggagcattctaatgtaatcaacttgccaccaggtagcaggctaattccctggggaatagtgccatattgaagactcaatgttgttctttgctactggcaaattgaatacccagtggtggctgtagccaggtcagccttggtaagtggaagttgattttgctgacctcatgcatcacctccatttctcacaccataaccacatttttatgagctcactgggtcatgaaagggtctggagaaagaaattgtctggtatccatacaatggatcattctgtcaattaaattattaaaatcatcatctgatgatgtcttcttttgaagcattcatatggggtacaaatgcctccatgatttttcccatttagatgtgtttatacagaaagttcttcccccaattttttgttattaatttatcaatcatgtttttttcaatttcctgatcatccagccaaccataggtcacagaccatgactcggtatgtaatctcatatcagaccatttctccttccagaaaagtgaacaatcagatgcaattctgtggttctaaccccttggagaagttctcttcacctgtgtcattcaggaatgtcctagaaagtggctgtagtgctgcaactgtctactttcaggtgttttctgcatacagtgaagaagcatatataaaccagacctgagttttctcctcctctgtcgattgattgtaggaaattcccatgaggcaatagacacagactaagcacctgagctgtgactcacctatcaggtcctgccaaagctccaaatagcattcctatctgccagcgacatttcaagaacaattggatctgctgaataatatggcccaagaggcagagcagtttgcaaagcagctgggacctataacagtttgcataacagttgggccccacaaaagaaactagcaatatctcgggccattcagtaaatgtaccagaataaaacacccaaataaggaatgtgttgctcccacaatccaaagaagctcactaggcgttatgcctttttctttttttttgtaatacgatcctgatgcaacaatgtatccttcaccttaaaagggatatcttgagattccacatatcactggacccttagaaatttcattatgttcaatcctgaacttctgtgggatttatttcccaccctctgacatgcaaatatcttaccagtaagcctagaatagttgctactttttgctcactaggtccaatcagcataatgtcatcagtgtaatggaccagtgtggtatcttttggaaggagaaggtgatcaagatccttgcaaactaaattataacctagggctagagagttaatatacacctgagataggacagtgaaggtgtatttctagccttgacagctgacagtaaactgcctctgatagtccttgttgacagaaatggagaaaaaggaacttgtaagatcaatagctacatgtcaggtaccaggggatgtattattttattcaagtaatgaaactacatttggtacagcagcttcaattgtagtcatcatctggtcaaacatgagaatgataattcattatcattctcccagatccatctgtcttctgcacagacaagtcgaatggaaaggtggtgggaataaacacccctgcatctttctgatcttgatggtggcactaatctctaccattcttccaggcatgcagtattgctattggtttactattttcctaagtagaggccatcctactgcattccaatcagactttctcatcctaatggccctcattccataggtaatggaaccaaagtgggggttaagacaactactgagtagatcaactgcaataatgcattccataactgaggaaataatcacagaataggttcagagatgcactgagctcactgtgaaatagatttaagctaaaactccactgatcatctgatcctcataagtctgtaccttgactgatgaaccatagttaattttgagatctcttgggattagtgttagttcaaccagtatcttgtagtcattgaaagatctggttatttcctttttcccagtatataattactctattaaagaccataggttactttgaggagggctgggagaaagaataacagtataaattttggcagtgtacagagatctttccataagtggacctagattcctctttattcaaaagattctgggtctttaaactggctcaagtctggaaatcgatcgaggcggggggccatgtctttctgttttcgtgattcaggttagacttttggtaacttaacctagaaattttctgcttatacagatcaaataagaatttagtatgctttctacttatttcacttcaaggaccatccatggtaaattagccaacaccagaggtctgcgcaagtcagactattctgattgctgcttcatctctgctgtccttcacagtaactacttctaccttgacttgggccgctgagtgccaccacttgacccctggcaccccaggatccaattactcacattgtatttaggttttccaatttactgacagcagttcccattgcagagtctggcctatagagaagaacagtcacagagcacttaaatcatgttaggttttccattacaaatttatttctcacagtattggtgaaaggtatgtcttctgtatcctcccagtgtgagcgagttggttttaaatgacaaactcactgcgacattctaatctccctaggcctttgaatcccctcctccacagtaaacccaggcaggtctgacattactgtcagccgcctgttgtagacccacatccataaattttgtctgatgcaactttgtttcttctactattatcccatacctttagtatctattcctacccatgttccccagatttctttctacatatttagaaaaccaagtggatattttgagtgtagtatacctctttgtgtgtaacacattgtacctgcctttagagacctaccagaccttaagtctggtatagatacagaaacaaagacagtgggttctttaccttttctttttatattaattattgtattttttttccaaaatgcattcttaggctaaaagtgtgggttcttagcaggacagcgaggacttacttttatggcaactttttcaggggatgtcattgttgttttctcagacaatcatagttaatccccttagatgagagtgcagaagccacattcccaatggggaggaagaggtctcttccgctggcaagaaaaatttaggggctcaatgttcccaatttcatgaggatcttcccacatagccccatttcaactttccttccctatccatgtcattctttcccaatcagtgccctcacttcaacagtgcacatcctacaaatctgggtctatttgcactgtaattcaagatgaaggcctgattttagttttcagcatctcaaccctacagctgtaggagaccaaggtctccattggggcagatataaaagctgtcagatcatttatgtagcatttaagctggaaactcaaattcctaagctaattctttatttttcccactttttccagcaacattattaggagaatcatgtcaacctactattcattagtttgccaagaacgttcaaaagcatcatagacacaattccccaagtccttgatccttataaatggttggtaaggagtaaccaatggtgatattttgtttatcccttttgccatttcagggccatggactatctgtgttctcttaactcctagaaatagtgttattagtgcctttaaacctaatcagataagagagccatttccaggaattccagaaccaattcataaaactcatgcctaaaattctgttcctgtaaaaccattctaggtaccaaaatctggatgaggcttttccagggaaataaaataataggcaattatgtacacacacaaactcacacatacacatacattagatttatatatatatatatatatatatcttcatatatatatattcctaaatatatatatacatacatatttaggaattggctcacatgattgtgaagcctgagaagtctcaagaactgcagtcagcaagctgttgacctgggaaagccaatagtatcatttcagcccacatccacagacctgagaaccaggagaaccaatggtgtcagtttcagtctcaatctacaggcttcaaacccaggagatctgatggtataagttccagctcaaaagcctgcaggcttgaaacccaggagtagttgatgttacaatttgagtcagaagacaggaaaacaaacaaacaaacaacaacaacaaaactattgtcccagctcaatcagtcaggcaagaggaatgcctacttatttatgatcaggtcagatttttgctctattccagccttcagctgtgtggatacaggccatttacattaggaggccaatcacattactcagtctactgattaaaatgttagtcttatccaaaaacacctacagagacacactgagaaaaatgtttgaccaaatatctgggcacacaatggcccagtcaagttgacacacaaaattaattatcatgaatactcacctcaagagtttacacaaatattaaatgagataatagatataagtacctagttaagcccaagtatatagtatactttcaacaaatgttgatcattgtcagaattagttattactattaagttcatggtagaaaatgtgttaagtattggtccaagaatagcaaggttgagagtagaactgggccactactctaccagattctggaaaaccaaggctaagaataatttctttaaagattatgctgatactagattcttcttgggagtaaaaggcttacacttatcattgatccctgtggaaattttacctcctagttttgtgggttaaagccaaatcttaagtgccttactacttctaagcacaggcactttaagagcgcaaagaagtattggagagaggtatagatttaagtgaaagttcataccaaatttttaaacttgaatcatatgatttgatttagtctcttaatctataatagttaatgtaagtttcttttgcttcttcctagaaagaatgacactaagggtttgatagtaaaacatatatactaatggatagattttcgagcatgtctggtttcacagtgataacactgattaggaccatgcacacagacattcttgattacaggtcttacagccatcatgttaaagatttgcctccagcattcacgcacacaggctgctctacattgccacagctttgcatccatgattattatttttcaattttaaattatgcattgaagccatatttacaagtgcacatatcataaatgtacagattattaaattgttacaaagtgtgtagtcttataagcaagagccagatcaataaatacaagattttaatcattagtttcctgctgctgtaagaatatagacccttaacccctagaatgaaagcaaactgccattctataattaacaaagtagcatctatggttagagtcagggttcaactctcagctccaccactggctaatccctctctgcctaacttttctcatttgtaaaataagcataataatatacctatctcatgggtatattaaatgagttaatacatgtgaagagctcagaaatgcctggctcataagaagctctcaataaatgtaagccatatttattgcatagttcatttcccctcatactacttgttaccagatggtgcctgaaatgacatgaagtgcttgctgaatgaataggaaggaaaaataagagtcctttacctaacagaatataaagtttcaatgaaattacaccatgcagagaaagcaatttgtcctgtttacatggaagacaaacaaggaactggactttggctttgagctgtgtgaatgggagatggcattgcttccgtgacccacattcacattcaataacaagaccagagagaaacagcttttaggagcccaacaggaatagtcacctaagagttgctatttgactaaacagctactccattcttttcttctacacagccgttccttgcacctttcaactgtgtggcaatatgactctcctgagattgagaaacagtgtgtcaggttccattcatccttaacataacagaggagtggtagctacagtataccagaaagggagctttcattgatctgcagcactctgtttccgtcacagggaagaatcttcttgcaaccagggcactagagaactgaacagccaagtaaaatattgggcaacatcgagtcacccgcacgcccacatagagtcccaatttagcaaaagagtaaagttcatgagcaagaccatcactaataatttgccacaaagagtaccaatttttctgttttatttgtgaagtgttgcaaaatgcttgctgctgatcctcccattgatttaagtacatctgaaccattttttttctatttccaactacagaaatctgtaatttattgagctatttttagctacaaactttccttgttgaaatctctggagttagaaatctaacaggcaagaggaattaaacaaggatcatgtaaattaggaagtgtatgcaaaagattatttgctgatgtattggtattgtggaggtactatacccagctagaagtcttgctgcagtctgtggctgttatttaaaagttattcaagaattactcttttcatatataaattatatgggtgaatacttaagaagttctgtgatttcttcatttgcacgcttccttaagctgccaagctgtttcagaaaaaacaagcaaacaaaacattcaatagcccagttatttcgcttttttttactaaacaggtgtttcattccatgagacaataacactgaaattatgatatatattacatcattgtttaccattgaatactggccagagggcattgccgacattcatatagttcttggtgtacatgtgatacaaattacccatgatgtcattagagaattgaaatgcaaagagagtaagaaaaatcttagaatgtagttgaaatacccttgaattttcaccattgttagggttattttttctagtatattcatctgaagcttctcctaaaagcttagattagacattgtcatattttgtttacgtttattgaaaatcagatcatttgtcacatttaggcactcctcaagcctctcaatggcaaactacctcattttctggcagaagacagagcatgagaattgaagcaatagactttacataaagtacactgtgtacttcttccccacggtaagaatagtttccatcccagacacactccaaaaccttccatgattttgatgacagtagcagtaaaaaattacttcacatttaccaaaatgggcaacaataaatctcaagtttcttttcacagctttgacaatcttaacttaccaattgagaaatttacttagtaagactataggggaactaggaaaatacacttgaattagcttttattttgccaaactaatccactgttgcaagtgccattgcatcaggtgggacagtatgtgaaataatgagtgttaacaataggactctcttgaattttatataggtatataataaattatatatataaaacaaaagatacctatggacacacatatgtatatatacatatatgtgcatatatatgtgtgtctctacatagatgtatatgtgtgtgatatgtaagcttataggaaatgaagtaggtttggagttataggcacactttttcaccctcacttgcatatatgacaatgtaagtgtctaaaaagaaaaaagattaaacaatcaattgataatagagattttcataataatggagatcataatatagatggaaaaaaagaaggccaaatatgtgccagacttactcatttatatttcttttatttgattcttagaacaaacttcaatttaaaagacaggaaccaatgttggcatcagttaagtaaataaggtttatagtctcacttacaatgagtaaatggaaatgcaagtttgaaatatacatttatagactttggttccagagtctgaactgggaaaaaagtagaaggagtaagcattgatatgagcatggcagtgtgaggtcaggctaactatatctgcaaagagaggtacactcagaaggaccaatagccggccttgttctagcagtaggagatctatgctaggatttcaaccagggagatggtgagtaggaagtgtcttgttaatttctttttttcttttcttttcttttaattttttaaaaaattttgatacagggtctcactatgatgcccaggctggagtgcaatggcatgatcataggtcactgcagccttgacttccccaggctcagatgatcctcccacctcagcctcccgagtagctgggactacaggtgcatgttaccatgcccagctaattttttattgcattttttgtagagaccaggttttgctatgttgcccagacagctttccaactcctgggctcaagcaatccatccacctcagcctcccaaagtgttgggattacaggcgtgagccactgcttgttaatttctgtagctcctatcaataaaaaatgattaaaatgattctattacctccaaatttcatgcaattacaaatgtcatgcatttacaaatttctgatttctccctaagcttacattaccttcattaccttacattcctttaccatcatccataccagtcggaatgaaaaaccagggccaatctcagggttctctatattagtaatctctcttggtttgaagtgaaggctagattgaagtggtcatgggtcccatacctcagagaacttaacatggtgagcttaagaataggtgaggggaaagagctctcctttccagtccatcatctggaaaagcttgagaaccactacctcaggtaaagcttcaactataaagcagagcagccacacggtgacatatttccccttgatgctcttttcagaattcttttgttttgtttaacacaaaagccctttgtaattgaagttaatgttttatggcctcatttcgaccactatgttgtcagtaattattaatagtaatctattttgtgttcaaatacatggaaaggaaaaatgaatcttccagctacaccccgggatatcacattggttacatcttagaagacagacttttgtaaaagtgtcccttgagacctctgccccatctcaaccaacttcattcacatgaaataatctgttaattgcaatataacaatttttaaaaaaagaaacattgaatttttcagtaaggatgtattctataattttatatgccaagcactattctagattttgatagtgttaatggaatctaaaattcttcagaagaaatgagatatagggacagaaaaattttaaaataaagtgctaaagaaaagatttttttattattaatatgtattgagctcctactatgttctaggcacacagcaataagcaacaacaaagtttcccctcttcttggagtttatattataatgggagtgggagaaaagactgtaaataaatggataaaatacaaatataatgtcacatagtgctctcagcttttatgacatataaatcaaggcaagtggataaagaaagacaggagggctcagttagagtatacatggaagtcctcaccactggagtgaaagctgaatagagttttaaataaattattataggcaaacaaataaagaagttttaaacttgtcctgggaggcatatagtaggtttcattgagaggagacatttaatcacactatcaagcaaaaggtagaagttgaaccaatagaaaatgaataggccaaaattttataagggtaaaaagacctactttccttaaatccaaagatgcatcaaatatagttttacaaaaaagctttagggaatcacaacttagttttggtaggaagagatgagagtttggtcaacacaaaatgtcaggcatttttcatcgaagaagctgctgtcacaaaatttaaaatgctgactaggtggaattttgctgtgggtttgctacttctttctagctacagctaagacctcaggacaatgtcttctccagaactcatttctatggaagtggggaagtctcaactgcttataagaactgcaactgcactatttaagaatttgaaattaggactcttcaatgtgtagagtgcactgtccacctcaacattgccacaggttcttattaaaatgcaattttgggggccttacctcagaccaattaatcagaatttatcagggggatcctggaaattttaattttcagcagacttgagtattagggggaactaactttgaaaagaagaaaagatatctttccaggcagaaggaagagcagaaacagaggtaataaggttgttagatcttgaggaacagaaagatctgtttagccaaaatatagttctcaaaagacagagtgatggaaaataaggtcaagatataagtagtccaaaccaagtagtgtcttctagctcatggcatggaaacccttccccaacttgaagggttagtggggagtcattggcagatattaaatatatgatgatcatattaaaaaataaaaatgccagtggagtctgcaaaggggaaggttttaaaaagctaccaaagaaattttacatcttcatcaactcttttttagttcttgtgtttttggaggataaaggtaaacattgcattcagggccttattttgactgaaacaaacaagtttatttttaatgacatctctttattattgtatacgttactgaaaagatagaaaactgcagctagaaagataaaatatcttgggccctattactagtattagttgatcttgtatcaagatctccctagagtacatgcaatttgatgtgccacagctgtggcttaatgcatgtgaaggtatgcgggctctgaaagaggcctcagtacaccttgtaaaataagaaagaggtaatgtcctaagcaggtctttattttgtatgacatctgatcctacttctcaactttatcattaaattttccaggatattatctaaataaataattttatataagaaatgcacagaataatttcatagaggatatcactgcttgctttgtacactcttactgcagaataggttgaattctcagcaggaacaaaaatagcttcacaatggaagtagttggaaagggtctagcataggattcagagaatggaatcttttttacagcttgaaaaaaatattgtttcaatgtacagatagtgcttgaaaagattggtttggcttttctaaataaaataattgctacactagtaattcacgacaagggaaaatttgttcctgtttcctcaccccaaaggagtatttatcagtgtctacagacattttttattatcataactgaaggggaactcctagtattagtgggtggaggccaatggtattgctaaatcctatggtacgcaggacagtccctgtcccccatccacatacatgacaaatcattatccaaatccaaatgtcaagagttcccagactgagaaaccctagactagaaatttaggtatggtagaaatgcttaccttatgagtaataaaacagaccctggactactcatttgtaatattcgtgtgtttgctgaaaagagaaatgaaggcaatggccacaggaaaagatatagatacatctggtcatataaaattatgtcccactaagtgaagtcctcagaagctgtaggagtatattaatttacaaaacctattctagaccatttcaattcctaaataaacagcaggagagagtaatagactgggaatcagaactatcaactcatctttccactccaaccctagttaactataatttttgaacaaaatacaacctccttgagtttctgttttctcctctgcaggctaggaagagaaagataattgactataatatcttttctcatccttatgactctatcatgtcgtgtttttcactgtgtcaatctagctaaataagaaactttattttccagaatgttgtggcctagatggttacaaattggggttggccataagaaaaatttacacagatttgaaaggtctttgtaggacaatggatattcaccttgctagtatgagtcaatagcttctccagcccatgctgagtctctcctattgaggtctcttgagttctgagtcaggaactcaactgggagacaaatggtgccagctactgcactgacaaggttgaaggcactggtagacatgtgctcccagtttgtccgtgtgggttctggtttgtcctattatttgaacaaatgtctgcttggtgtccttattctctgtctcgaatttgtattcattctttcctacttcatgcccaggtttctttccactagccctaacctagtgcaactttgtgcccaccaccaaatacataggcaatagcttttcttagacttttttgccagattccataattgtgtgagatatcatgcttataataaattgtaggagctcagtcatagtggtgggagaagctaccgagatatgagcaggccttctgaaagttcagaaggctgtgtatagctttgggggagaataagctgaaggcagctgttctcgtaccctgaggcagagggcaaggagtagatacaaggaagcatagtggaatttagtgcaaataagcttgtttacctatgttaaccagaaattttgaccccagaaagggagaacaataatgttaattacccacagattgtgttggctccaggctttcggcattatgtctgtactaaatgaaagcaagcagctccagcttattgaggctgctcactcttcagcagtcccctagctgctctttcactgcatacctgtgtctgcatactcctttcatccattgcttggccagggtctgtgggatggacctggcaataaatcctttaatctatatcactcataagggttctccttcccttgttcttctgagaaatacggaatgtatcaatgctaatgactgagaggggaatggagtttaaaccccactggagattataaagaaactgaaaaatgaaaatcacaaagtagacatactttcagccatgcgccgtggctcatgcctgtaatcccagcactttgggaggccaaggcgggcagatcatgagctcaggagtttgagaccaacatgaccaaaatgctgaaaccctgtctctactaaaaatacaaaaattaatggagtgtggtggcgcatgcctctaatcccagctagtcaggaggctgaagcaggagaattacttggacctgggatgcagaagttgcagtgagccaagatcgtgctattgcactccactctgggtgacagggtgagactctctctcaaaaaaaaaaaaaaatagacatacatttaatttctactttttaatttctttcttcactttgtgattttcgtttttgttgacagaatctgcagtgttttccacatgtctctaataactacctaacaatggtaattcatttttctaagcataatgtagctatgcagaccctcaagaaatggatactttaggaaaagtgatattacaatttaagaaataaattaagctagaataccatgctccaaaaagtgttctgctgatcaatagtgttagcttcgttttctaaaatgcactatctaataataattttaggaagtattttatgcattagcctattttgcaaataaattatatattaagaatattttgcaaaaaatcttgacgctaagcaacttgtttaattacatttaatccagtatttcccaacttaattaagcatcagcttttattccctcctagataaatgtgttaaaattaaaaaaaaaagtgtagaaaattctgtactacataatgtaatgaagcactgattttaaacaacctaagtgtttagagaaaagggatataaatatgaggtccagtagtcttggaggacatcataaaggaagtatagtttgtattggaacataggctaagtatttatatgagcagaaaagagaaggaataaatagcactttagaaataatgggtgacataattgagtggaatttataacatagggagaaagccagcttttggtgaagaactatctgatagagtcatatttcagatggctttgaaatctagactaagattttttaacttttattgataggagttagaaacacagattgttgaatcattaagtgttatgaaaaatatgaaatattttccccagcatcactttgctagtaaatggtagagtcagagttcaaactcaggagctctgaatccaaagactgttattccagtctctactattggatttcctagcaggtccactgaatagtaagtacatttgggaaaaaaatggattcataaacaatctgcgaatttggataataggttacctcagagtggcttacacctgggggaacatggaagcctgaacatgggtattttggaaatgatgtaccaaacaagttacaaatctatgtcctggtcatatttgagggagccccatgagctcactgaggtcatgaacctgacactgaagcaaatcgtccaactgaaatcaaaaacagaagctgtggaattagcaccaaaagacagaaatgtaaccaagcctggagatttcctggcaagagtaaaaggttatggaaaactcatctcctgcttttctggtctagtaaaacctgactgaattattacagaaaggtaaaaaattaaaataaaaggatccatttgtaggattcctaccaagggaacattttgaagttggaactgaaggcagagatatgaggtccagttgatttcaaaacagtagaaaattatgaaaccgcttggacaattaatggcttaccactgtagatccatctggatcacacactgaagtgtgcccctgctaagtgcacagagatttctctgggttttttgagcatgcttgtacatctgctgaagtgattggagaaaaaaacatagactaagaacatcagttatagtttcaaatttggttagtttgtaaattctttactcctttttatttatttattttttattttattattattgtactttaagttttagggtgcatgtgcacaatgtgcaggtttgttacatatatatacatgtgccatgttggtgtactgcacccattaacttgtcatttagcattaggtatatctcctaatgctatccctccccctccccccatcccacaacagtccctggagtgtgatgttccccttcctgtgtccatgtgttcttgttgttcaattcccacctatgagtgagaacatgctgtgtttgggttttgtcctcgtgatagtttgctgagaatgatgatttccagtttcatccatgtccctgcaaaggacatgaactcatcattttttatggctgcatagtattctatggtgtatatgtgccacattttcttaatccagtctatcgttgttggacatttgggttggttccaagtctttggtattgtgaatagtgccgcaataaacatacgtgtgcatgtgtctttataccaacatgatttatagttctttgggtatatacccagtaatgggatggctgggtcaaatggtatttctagttctagatccctgaggaatcgccacactgacttccgcaatggttgaactagtttacagtcccaccaacagtgtaaaaatgttcctatttctccacatcctctccagcacctgttgtttcctgactttttaatgattgccattctaactggtgtgagatggtatctcattgtggttttgatttgcatttctctgatggccagtgatgataactattttttcatgtgttttttggctgcataaatgtcttcttttgagatgtgtctttcatatcctttgcccactttttgatggggttgtctgtttttttcttgtaaatttgtttgagttcattgtagattctggatattagccctttgtcagatgagtaggttgtgaaaattttctcccattctgtaggaggttgcctgttcactctgatggtagtttcttttactgtgcagaagctctttagtttaattagatcccatttttcaattttggcttttgttgccattgcttttggtgttttattactctccttctttattagaaaactaaaccttattacactcagagaaatagaatgagatgagttattagtaaagagtttagggtgtccacatttatcaatgctgtttatgtgtaaaataaatgaaaaggagggagagatattgaaaactgcaatcctgggactcatagtgtattttgaatacagggctttatttttcctctttttacttcaataaactatgtttcttaaaggatacaggagtgaaaatgatttcaaataacttggtgtcaagaatcatggagtgggtgtttttgcttaatccttctttattttattctcactaaaataaacttgggttatttataaatagaaaatatgtaaaaatccttgaaaataagaaaacataccatgaacagataagtaattttcagcaacctataatttcttctcactctctgcctattctgagtggctggcattcatcacttacacttgactaaagtctcgagtactttaaaaatgcaaaatctaccttgaaaggcacccagcgtggcaattaaagcttggtagggaagctaatcagaacataaaccaatgatgtaaaaaaataaataagacgattttttttttttttttttttggctacagggtctcactctgtcacccacagtgggttgcagtagtgctatcatagctcactgcagcctcaacctcctgggcacaagcaatccccttgcttcagcctcccaaatagctgggactacagatgtgtatcgccaagtttggttattttttttttttaattttttgtacagacaaagtctgcctatcttgctcaggctggtcttgaactcctgagctcaagtgatcctcctgcctcggcctcacaaagtgctggaattacagtcataagtcgccctgcctggataaaaagacaatgtttttggaatatttttgttagtgtatttaatcaaaagtctaaataagataaccaacatcgtcagaaaataattaataatctaaaataacaagtccattctcacaaaacaaagggcaacaagatgactagctatcaaataagaccgagagcttaatagaattgggagggaaagatggagaaagatggcaaaacggaaggctccagtgatatctgccctgcaaggacagcaatttggcaaccacctacacacaaaaggcactcatagtactggttttaacttcaagtccctgagagaggcactgaagcggtagaaaaagtcttgaattgctgatgccacccctcccctatccccatggcaacaatgttgtggtgcagagagtgttgtggggcactgaggagagggaagtcacagcatttgcaaggcattgaacttagtgctgtcctattataaaagaaaacaaaacaggaccaaactcagctgatgcccacccatggaaggggcatttaaacgagccctagccaaaggggactcaccaatcccagtggtaggaactcttcctgcaagccttgccactgtgaactaaagggctctggggctataaacttgcaaggcagtctaagccacaaggactgcaactcttaggcaagttatagtgcttaactggagccagagacagtagactagggggtgggggcacgtgacctactgagacatcaaccagatctgctaaaggagcgctgatgccactccacacttaaccgcaggtgcacagctagaggctccaaaagatagcccttccctccacatgagtgagtagagggaagagttgggagggctttgttttgcatctcggacaccagctcagccacagcagtatagggcactggtcacagttatgaggtccccattctaggccctagctcccagactacatttctagacacatcctgggccagaaaggaacccgattccttgaagggaaggatgaagtactggcaggatttatcacatgctaactgaagtgtccttgggccctgaataaccagcagcaataccgaagtaccatatcaagggcctttggagagactctgaggcttgctggcttccagtgagatgcgacacttttccaactgtgatggctataagcaagacttcttcaacttgagataagcaaatggggattttgtcttgcgtcttagataccagcttggccacaggagggtagagcaccaagcaggctcttggggtcttcaattccaggacttggcttttggatggcatttctggacctgccatcagccagaggggaacccactgtgctgaagggtgagtcctaggccaagcagcattcaccacaagcggactgaagagcccttgggcattaaacaaacagcaggggtagtgtagatgtactccccataggcctgtggttatggcagccaagggatgaggcgcttctgactttcaaaagagaagtaaagaatagaaagaaaagtatgctgtggtttgagtggcagttcatccacagtacaattgaacaccaggtagatttctaagatgtttaactctagtccctggcttttgtacatgtccagggcctgggagaacttaccatgttgaaaggaaggacacaggcctggctgactttgactctttctgattatggagacccagggacttgagtgaacataggccatagccagggagtggatataacaggctttggttgagatccagtactgtgctggcttcaggtatgactcactgcagtctcaatggtagtggccacaggtgtgcttgtgtcacaccatcacaccacccagagctccaggtggctcagaacagagagagagagagagagagagagagagagagagaagcagacagacagacagactctgttcatttgggagaaagtaaggcaagggaacaagtgtttttgcctagtaatccagaaaattcgtccagctctccaataccattaaggtggtatatccacaagtctgcaagaagcacagtgttagtgggcttggggtgccccctaaagcaaatagaccttagatcaaacacccaagtccttttgaatatttagaaagcattctcaagaagaatgcttggaagcccagactaagaagactacaatacatgcctaacatttcaagaccagacaccaacaaacatctacaaacatcaccaccatccagaaaatcatgaactcaaaaaatgaaccaaggcacatgtatacatatgtaactaacctgcacaatgtgcacatgtaccctaaaacttaaagtataataaaaaaaaatgaaccaaatgagccatcagggaccagtcttggagaaacagagatatgtaacctttcagacagagaattcaaaatatctgttttgaggaaactgaaacaaatttaagataacagagagggtcaggcgtggtggctcatgcctgtaatcccagcactttgggaggctgacgtgggcggatcacaagatcaggaaatcaagaccatcctggtgaacatggtgaaaccctgtctctactaaaaatacaaaaattagctgggcatggtggcaggtgcctgtaatcccagctacttggaggctgaggcaggagaattgcttgatcccaggaggcagaggttgcagtgagccgagatcatgccactgcaccccagcctggcgacagagcgaaactgtctcaaacaaacaaacaaaaagataacacagaaaaggaatttagaatcctatcaggtaaatttaactgagggatttaaataattaaaaagaattcagcagaaattctggagtttttgaaaaatgcaattggcatacagaagaatgcatcagagacttaatggcagaattgatcaagcagaagaaagaattagtgagcttaaagagaggctatttgaaaatatatagtcagaggacacaaatgaaaaaaagaatgaaaacaatgaagcacacctagcctcaacagggcaaatttaagagttactggccttaaaaatattcctcaaaaaataagggagaaatagactttcccagacaaacagaagcttagggattttaccagcaccagacctgtcctgagagaaatgctaaagagagtaatttaatcagaaagaaaggaatgttaatgatcaataagaaatcatctgaagctgcaaaactcactggcaacattaagtacacagaaaaacatagaatattataacactctgactatggtgtgtaaactacttttatcttaagtagaaggactaaacaatgaaccaataaaaaataataaccacaacaaattttcaagacatagacagtacagtacagtaagatataagtagaaacaacaaaaagtaaaatgtggggcaacaaagttaaaatatagtgtgtttattagttttctttttgctttcgtttgtttatgcaaacagtattaaattgttatcagcttaaaataatgagttacaagatagtatttgcacgtccagtggtaaccttaaaccagaaatatatatatatgtatgcatccagatgggtaatgtctgctcatagtgagacaccagctgaggtagctcacagcaacaaaaatgactccttcctgcttgaggagaggagagcaaatagtaaagaggactttggcttgcatcttacataccagctcagccacataggatagggcaacgggcagagtcatgaggcccccattttaggccctagctcccggatgacatttggaggcacaccatgggccaaaagggaatctgctgccttgaagggaaggacctagtcctggaaggattcttaatatgctgactaaatggccctcaggacctgaattaccaacagggatgcccaggtagtatgccatgggccttaggtgagactcagagatatgctgtcttcaggtgaaacccagaacatttgcatctgtgatggctatgatgaaagccactcactctgcttaagaaaagcagagggaaaaataaaagggactcagtcttgcaccttatatatcagcttattcatagtaggaaagaggaccaagcaggagcttaggtttcctgagtctgggcctaagttcttggacaacatttctggatctaagctggggagcccactgccctgaagggtgagtcccgggtctggcagcattcaccacaagctgactgaagagccattggcctttaattaaacatcagtggtaggttggcagagctccctgtggcccagtgatagtggtggccaccagaaaaggcacctctaccaatggagaggggaaaaaagagtgggaaggactgaccgtctattgtggtttgaaggtcagctcagctgcagtagaaaagaaaatcaggtagaattctcatgtttttgacttcaatcactggattccatacagcatctttagacctccccagggcttatggaaagatgccaccctaaagggaaggacacaaacctggctggcttcccccctcacccagccccctgccgattgtagagccctgtggccttcagggaacataggcaatagccaggtagtgtttatagatgaccttgggtgagacccagtgttttgctggcttcaggtttgatccattgaagtcccagtggtggtggccaaagaggtgcttttttcaccctaccctcagtttcgggtggctcagcacagagaaagactctgtttatttgggagaaagtaagggaaaagaataagagtcactacctggtaatgcatggaattcttccagatcttatccaagacaaccaaggtggtacctatacaagtctgtaagaagcacaatatttatgagcttggggcttaatgtggtttggttctgtgtcaccacccaaatctcatctctgactttaatcctacatgttgggggaggggcccagtgggaggtgattgaataatgggggaaaacttcccctttgcttttctcctgtcagtgagtgagttttcataagatctggatgttcacttcccccttcactctctctctcctgctccactatggtaagacgtgtttgtttcccctttgccttctgccattgtaagtttcctgaggcctcctagccatgcttccagttaagtctgtggaactgtgagtcaattaaacctcttttcttcataaattacccagtctcaggtagttctttatagcagtgtgagaacgaactaatacaagacccacattccttttaatacctggaaagccttcccaagaaaggcaagcccaaacaagccttgactgcaaaggctacaataaatacctgactcttcaatgctcagacacccataaatatgcacaagattctacactatccagaaaaacatgacattgccaaatgaactaaataccaaccctggagaaaaagagctatgtgacacttcagacagagagttcaaaatagccattttaaggaaattccaataaattcaagataacacagagaaggaattcagaatcctatcagataaatttaactaagatatcgaaataattttaaaaactcaagcagaaattctggaattaaaaaatgcaattgacatacagaagaatgcatcagactcaatggctgaattgatcaagcagaagaaataattagtgagtttgaagacagggtatttaaaatacaaagtcagaggagacaaaagaagaaacacaacaaagcatacctacaggatctagaaaatagccacaaaagggaaaacccaagagttactggccttaaagaggaggaatagaaagataggggtagaaattttatacaaatggataataacagagatctttccaaatctagagaaagatatcaaaatccaagtatgagaagtttatagaacaccaagcaagtttaacccaaacaagactacctcaaggcatttaataattaaatttccaaagatcaaagattttaaaaaggattctaaaagcagcaagaaaaaagaaacaaataacatacaatagaaccacaatacatctggcaacagacttttcagtggaaaccccataggccaggagagagtagtatgatatatttaaagtggtgaagggaaaaacttttaacctagaaagtaaatctggtgaaaatatccttcaagcatgaaggagaattaaaggccttcccagacaaacaaaaactgagggatttcatcaacactgaacctgttccaaaagaaatgctaaagggaattctctaatccgaaagaaaaagatgttgataatcaggaagaaatcatctgaagttacaaagctcaatggcaatagtaatactaagcactggtaacactaagtacagagaaaccaatatattataacactgtaattgtgaggtgtaaagtactattatcttaagtagaaaaaaaatgatgaaccaatcaaaaataatcactacaactttacatgacatagtaccataatacatgaaaagaaataacaaaacttaaaaagcagggggatgaagttaaaatgtagagttttcattcattttctttttgcttattggtttgtttatgcaatcagtgttgagtggtcattactttaaaataatgggttttaagatagtatttgcaagcctcatggtaacctcaaatcaaaaaacattcactggatacacaaaaaaaataaaagcaagaaagtaagttataccacaagggacaatcaccttcaatttaaaaaagacagaaagaaagaaatgaagagagagaagaccaaaagaccaccagaaaacaacaaaatgccaggagtaagcacttacttatcaataacaacattgaatgtaaacagattaaactctccattcaaaatataaagagtggctgagtggataaaaaaagtaagactcaatgatcctaaaggaaacacatttcacctatatattaatatatacatatagactgaaaataaagggatggaaaaagatactccacgtcaatggaaaccaaaaaagagcaggaatagctatacttatatcaaacatagtagatttcaagacaaaaactatcagaagggacaaaggatgtaattatataatgataaaggggtcaatttagcaattaggtaaacattgtaaatgtgcatctcaatgctgagcacccaggtatataaagcaaacattattggagctaaagagagatatagacctgcctacagtaacagctggaggcttcaacatgccactttcagctttggacagatcttccagacagaaaatcaatataaaaaatcagatttaatctgcagtatagaacaaatggacctaaaaggtatttacagaacatttaatccaacagctgtagaatatacattattctcctcagcacataaatcattctcaaggacagtccatatattagaccacaaaacaagtcttaaaatactaaaaaaaaaagaaataatataattctgaccacaatagaataaaactagaaattaataacaagaggaattttggaaactatacaaacatgtggaaatttaaaaactacgctactgaatgaacagtgggtcaatgaaaaaattacaaaggaaatttaaaaatttcttgaaacaaatgaaaacacaacatgtcaaaacctatgggatactgcaaaagcaacggtaagagggaaatttatagcaataagtgcctacattaaaaagaagaaaaacatcaaacaagtaacattatgatgcatcttgaagaactataaatgcaaaagcaaatcaaccccaaaattagtagaagaaaagaaataataaagatcagagcagaaataaatgaaattgaaacaaaacattacaaaagatcaacaaaatgaaaatctacttttatgaaagacaattaaaattgacaaatctttagctagactaagaaaaaaggagacacctatattttcaaaaatcagagctgaaaagagatattattactgatactgaaggatttccaaggatcactagtggctactatgagaaactatatcccaatatatttcaaaatctagagaaagtggatgaatttctagatatatacaacctaacaagattgaaaaatgcagaaattcagaacctgaacaaagaaataacaagtaacaagattgaagccatcataaagggtctcccagtaaagaaaagcccaggatcagatggcttgactgctgaattctaccaaacacttaaagaagaattaatactaattctattcaaactattccaaaaattagataaggaggaaatacttctaaactcattctatgaagccagtattaccctgataccaaaaccagaaaaagacacatcaaaaaagaaaattataggctataaaactatagttaaaatttaaaactatagtttacttagaaaactaagaaaactcttcaaaatctctaatgaatattaatgcaaaaaatcctcaacaaaatactagcaaaccaaattgaacaatatattaaaaagatcattcatcatgatgaagtgggatttatcccagggatgcaaggatggtttaacataaacaaatcaatcaatgtgatacatcatatcaacagaatgaaggccaaaaccatatgatcatttcaattcatccataagaaccattttataaagtgcaacatccctttatgattaaagaaaactctcaaaaaactgggcataaaagaaacaaacctcaacgtaaaaaagccatatacaaaagatccacagctactatcatactgaatggggaaagaaatgaaagcctttcctttaagatatggaacatgacaaagatgtccaccgtcaccactgttatttgacatagcactaggagtcctagccaaaggaatcaggcaagagaaaaaaaataaaatgcatccaaatgcaaaggcagaagtcaatttattcttggttgcagataatatgatcctttttttaaaaaaaaaaaacctaaagacactaccaataaactattggaactgataaacaaatgcactaaagttgaaggatacaaaatcaaaatacatgaatcagtagcatttctatgtatcaatagtaaacaatctgaaaaataaatgtaaaaataatccaatttacaatagccacaaataaaattaaataccaggaattaacataaccaaagaagtgaagaatctctacagtgaaaaccataaaacactgatgaaagatactgtagaggtcacaaataaacagaaaaatattccatgttcatggactggaagaattaacattattaaaatgttcatactacccaaagcaatctacagactcaatgcaatcgctatcaaaataccattaacattcttcacagaaatagaaaacataatcctaaaagttatatggaaccacgaaagacttagaatagccaacgctatcctaagcaaaaagaacacaactgaagaaatcacattacctgacttcaaattatactaacagagctatggtaactaaaccagcatggtactggcatagaaacagacacataggtcaatggaacagaatagagaactcagagacaaattcatctgcctacagtgaactcatttttgacaaagtttccaagagcatgtggtagggaaagaatagtatcttcaataaattgtgatggggaaattgaatatctgtatgcagaatgatgaaactagacccctatctcttgctctacacaaaaaagtcaattcaaaatggatcaaagacttaaatttgaggcctcaacctatgaaactactatgaataaacattgggaaaactctacaggacattggtctgggcaaaaatttcttgagtaacaccccacaagcacaggcagccaaagtaaaaatggacaaatgggatcacatcaagttaaaaagcttctgcacaacaaaggatacaatcaacaaagtaaagagacaagccacagaataggagaaaataattgcaacctactcatctgacaagggattaataaccagaatacatcaggagctcaaacaactctacaaggaaaaaatctaataatccaatttgaaaatgggcaaaatatctaaatagatatttctccaaagaagacatataaatggcaagcaggcctatgaaaaggtgctcaacgttattaatcataggagaaaagcaaatccccaaactacaatgagatatcatcttaccccagttaaaatggcttttatccaaaagacaggcagtaacaaatgttggcgaggatgtagagaaaagcgaacccttgcacactgttggtggggatgtaaattagtacaaccactatgggtaacattttggaggttcttcagaaaactgatagtagaactatcatgtgattcagcaatcccactgcttggtatatacccaaaagaaaggaaatcagtacattgaagagatatctgaactcctatgtttggtgcagcactgttcacaatagctaagacttggaagcaacctaagggtccatcaacagatgaatagataaagaaaatgtagtgcatatacacaatggagtactaactagctataacaaatgagatctagtcatttgcaacaacgtggatggaactggagatcattatgttaaatgaaatattaagtcaggcacagagagaagaaagataaacattgcatgttctcacttatttgtgtgatctaaaagtcaaaacaattgaacacatgaacacagagagtagaaggatggttaacagagtctgggaagggtattgggggtgggagtagggggtgtagtgtgagtaggattgggggcagttgataggtacaaaaacgtagttagaaagaatgaaaaagagctactaatcgattgcacaactgggtgaatatagccaataatgatttaactgtacattttaaaataaccaagagtgtaattggatgatttgtaacacaaagaaaaatacttaaggtgatgaataccccatttatcatgatgtgatcattaaacatcgcatgcctgtatcaaagtatctcaaataccccataaatatatacacctactatatacccacataaattgcaaataacatttttaaaatagtaataataaaaataaaaggaagaactttatttagcatatctggtctttctctctgatttgtttcccttttcttcatcctcaaatgagctctcttccatgtagcagtaaagatgggcttcagtattgccaatatattattcttggcacctatgatctttgaaggaacaaaaatttctttcactacagatacatcaattaacactaagctgatgtaattggcccagcttggatctgacatccgtagatctgattggctaggcccaggttgcatgcccaccttagaaatgaacagtaaaatgagtcctttataaacaacataaacaaaaattaaaggagaacagattccactatctgaagagactggccttgcttcctgaagaggagaagtaaacaatgaaaaataagcaatattttacaccaaccatgatttagttcatcttgtatggactcttcggctgccaaatttaatatcatatgtattatctgaaagaaatgcagatttatatagcaaataaataaacagttcacttggagaacacacttaactcttgaattagtaaatcagcatttgttttatattacctaaagtctgttctttatcactttgacttgtacaaactagacaagatgaatttctttaattgaaaattctactttgtgaaatatgtgctatagatagtgaacagaatataaagcaggataatccttgaaagttaatagagatatcttcccctcaaaaaaaaaaaaaacaaaaccaaacaaaaacagcctatatttttacaaataaacagtgggaacaatggcatgtgccaaaagagagcaaagggaaacttgccagaccatcatttattcaggcatgcagggcctggtatgacacagtcagttgcatttaaataacatgggcaacatctttcatttcagggtgcttacattaagtagaaaaaaggaaaaccttatttcctgtggccccctgtgcatggtttttcccccagactattttctgttttccttttccaactttgtgctctggccatggtgctgaatgctggagggccacaactcgattagccccaggctgacacgaagagcacagttcaaattgtggatttaaagttacagtagataattattcttttgtaagaagtggtattttcttttttgagtaggataatttgtgatgtgggataaggcagagatcatggcccaaaagaatatcacattattgactctgcttcagggaggaacatttgtctctgccttcaagtaaaattatggttactacttcttagtagcacaaagacacattaattagttttgagaacaaattaattacagaaactacttgcatcaatgtggaagaaaatactttaatacctcgaaaaataaaaaataaaaaattctttacttaagatgtaagctccatatgggcaatgttttgttttatctattttgttttgctttattttcttcctatgcccctactatatctctagtatgccaaaatgaacatcacacatagaaagcattagacactttttcttaaaaagatttttcctctacttactatggtatttttaaaaagttactatcctctttgcctcagttactttatatatgtgagttgtacctagatcacaggattatgtgatgattaagtgacataaaacatatgaaatactttttagagtgtcatgtgaagatcactaaaaattagtatgactatcatttaatataagataaataaaaggtacttgaatatgaaatacatacttatatcaagacctttcaaaatgaacatgtgtttcttaacacttagagttttgaattcatgtaattatattaaagtacaaaaatttaaaaatatacttaacttgtataggcacatttaccataactttctacatgtggcaatatgaacaatgccttagaggaaatttaaaaatgaatttcaagaactgtcaactaagaaataattgcttgaaatgatttaataaatattaaatagtggagaaatcattggaaggatagtaaaaaatgatgatgcaagcaaaatttaatagtatcaatgaaaagcaaatgtgttagttaaaaatcattttcatacaaaattgttggtaacaaatgatgttacaaacattcaacacctatctatcattacctgaatgaccacattccaaaatagtaattttgttaaggtggtgtggtacaacatattatatggtctcatataatataaaaaatacattttatatctgtaaatatttttgaaaattagttatgatttaattaaaatgaaaatttcatacattatgttaccagattattctgaagctccagatttagtgcattttaattacttcaaaatatatttgtcacattttcttgttataagagatatattatttttaagctttctattttgatattattatagaccaaccagatgatataggtaagtatcgatatagacagacacattcacacaagtacatccgtggaggtcccacgagctctgcctatctctcctccattgttagtatcgtgtataactatactacaatatcaaaaacataagaactgattttagtacaatccatgacttttttaaaattttaccagttacacaaccatttatatgcacacgacatatgtgtgtgcagctctatgcaattttattacatgtgtagctttgtgtaactaccactacaatcaaggtgcagaactgattttttactgcatgctaccatttagagccaactataactctcccccaaaaaccttttcctctgtaagctactaatttgttttctagccatataataacattattttaacaatcacagatacattggattatacattatgtaaacttttttgattggcttttctcacttaacgtaactccctaaagatccttccaagttgtgtgtgtaataagactttgtttcttacagagtatcattccatggtatagatatgcttcagtttaactattcacccttgaagaatatttgggttacagttttttgactattacatgtaaagccaaaaaactgtaggataaattctctaggataaatgcctgagagtgaatttctatgatgtagacacagtacatttttagtttttaaataaaatgccaaattaatttccagactctctcattttacatttataccagcaatgtaaaagcaatctatttttttccacatccttgaaagtattttgtgtttgtactgtatttttaatttatttattctgatatgtgtgtaacatattaatatattattatagtttaaatttgtatttccctagtgatcaatagggttgaatatttttcatgcactgtatttcctctgtatttcctctttgtgaaataactgctcatgttttctgtccatttcatatttgaatttcttattgatacggtttatgagtcatttatatactgttgattcaaactcttagtcagatacgtgctttgcaaatattttctcacagtccatagcttatcttttcattctcttaacagagttctcaacatggcaaaatttttttatttttatgaggttcaatttgtcaattttggatcatgcctgcataagtattattacctgcataattatttaaaactgatgtttgtgtacatatcgtcacatttactgctgggctacggagggtggcatgggcaaagaattttttagtggcttgcatttctatactaggtttagatcaagggtttttttcttgatttttgagtcaatttctgaaaggtatatttttcatagaaattgactcaggtcctctaaattttcagcaagtttgatgaaatttttgattcattcctgctcttctcttttcatttatgctgtataattcaaaattttgttgacttgtgctttttcttttcactggtcattttcttaagagttttgtgtatttcattaatctttaaaaaaatgagcatattgcatgtttgtttcatactttttttgctcttatgtttattatgttctttttcctatttaaggatttattctactgtttttttctaatttcttaagttacatacttatataatgaatgcttagccttcattattttgacaataaaaatttaaggccatatatttcttttaaaatactcttctgctgaattccataaagggtgtgtgtgtgtgtgtgtgtgtgtgtgtgtgtgtgttttaaattaatagactatattttcaagcatagtctcaggtttgcaaatatattgaacagatagtatagagggttcccatatattttcttttcccctacagttttctccaattaacatattgcattaatgagaacatttgttatagcaaatgaagcactatgagtacatcattattaactaaagtccatagtactacatattaggtttaaaagcctacgagagtcttctacctaacaaaagcctaatctctaagggtacggaatttgccagatgacgattctaagacattatcctatttggggtatggaattttgccctagcacgatcctttttgtttcatgtaagaggaaaaactaaaaagtcaaactgtgcatcccagaaataggttgacctaaaaggaagaggctgaaatacaaaaagtgatttaaagagtttacttgagccaaaataaggatggctgcctggaagactcaggcccaagaaaccttggatataagctccatttggcgtttgttacaaccagattttaaaggcaaaaaaagaaaaaaaaaacaggacagggagtgttttatacaaagttctgtaaggaattctcattggtttacagagataatattgattagtgatcagttatacattgttaagtgatggagtgtgagatatagtgtctggtgacaaaaaaataagaaacattaaagaaacaaaaaaaatcagaatcagattaagatatgaaacaggtgttggaattatcagacatggtattcaaataactatgattatatgttaaggattctaatagaaaaggtaaacattatgcaaagtcagatgggtaatgtctggtcttatttagagaaattaaagtgcaaagaaaaaatcaaatttatatgctaaaaattaaaaaacaaaatagtattactaataaagaatgactttggcaggttcattactagactcaacacagttgaggaataaatcaatgaatagaagcattccaaaatatgatacaaatagaaaaaaagagaatgtcaaagacacagcacagaatatccaagaactacagaataatatcaaaagtataatgtacatatacttaaaataccaaaagattaaaaaaagagaaaaggacaaaagaaatatttgaattagtaatgcccaagaactttacaaaattaatgacagacaacacactacaaattcaagatcatagaacaccaaaaaggtaaatatttagtgaaaaaaaaacctagaaatactatattcaaattgcagaaagccgatttaaaaaaggagtatctcgaatgaattggctgggaacatacatacatatatatgtttacatatacaggaacatagagataagtgaattaagtgacagcaatgtcacaagggatgggaggaaggaattaggattagtcttttaaaatatctgcactacatctaaagcaatacagtgctatttgaaagtgaacatgggttgttttaaaaatgtacattgtaaacccagggaaaaccactaaaatgatttaaaatttttaaaaatgtataaccaagagaaagaaataaaaattaaatcatataggaagcttaaggaagaatagaaaaaataaaagaaaaaaaggaacaactaaaatgaataaaaagttgttataaacatgttacattttaagtcaatagtatcaatgatcactttaaataagaataatccaaagacatctgttaaaaggcagagactgtcagattaattacaaaaatacaactttatgctgtctacaggaaactttctttaaatacagactcaggtaggttaaaagtaaaagaataataaatatatactatcctaaaacaaataaaaagaaaggtggattggctattttaatttccaacaaagcagacttaagaacgtaacagattatcagagataaataaagggtttgcataatgacaaagggccaatgctccaaaaaaaaaaaactaccctaaacaattatgtgcctaaccacagagtggcaaaatctgtgaggcaaaacatgatataattgaaaggataaagagacaaatccaatatcatagttggagatttcaatatctttatatcactaattgatagatcaagtaggaaaaaatcaataaggatacagatgatttgaacagcaatatcaatcaacttgctctaattgacatctatagaatatttcatctgacaacagcagaatacacgttcttctcatgcacacatagagctttcactaagagaggccatattctggccatgaataaacacctaacaaatttaaatgaataaaagtcatataaagagaactcttaggtgatatggaattaaattagaaattaataacagaaagatagctggaaaaaattcaaaatatttggatattaaacaccacccttttaaataacacttgaattaaaaaagaagtctcaagagaaaattaaaaatgtgaattaaatacaaatgaaaatataacatcaaaatttgtgggatgcaactaaagcagtacttataggaaattatataacatatttaaaaagatttccactaatgactgctaggagaaaaatcttaaaatgtataacataagtttccacattaggagtacagagaagggaagaaaatttaaagctaaagaatttagaataaaatgaatgataaagattaaaattgagattaggaaaaaaatagagacagtgagtaaaaccaaaagctcgttctttaaaacagtcaacaaaattgataagacataggcagaatgtacaaattttaacaaagactcaaattaccaatgtcattactaactccatgaacattaaaagataataaagaaatatgcaaaagtctatgcccacaaatttgataacttagattaggtaaacccaactctaggaaacacaaattacaaaaactcactcaaagagaaataatctcaataaccctgtatctattaaataatttacttagtcgttataaactgccccaataattaaacaccaagcccagttgcttcactaatgaattccacctaaaagttgagaaagaaataacaccagtgttttgctatctcttttggaaaacaaatgcaaagggacacattttaaggatacataaaacacattttagggcacatttatgtattctgaaaatgtgacctaatgcattttatgaagccagccttattttaataccaataccagatggagtcattgcaaagaaagaaaactacagaccaacatgtctccttgaacataaacaaaagatttctgaacaaatattagcaaattgaatccagcaacatataaaaaggattacatagtaagaccaaatgtaattcatttgagaaatctaaagttgcttcaacattcataaatcattcaatgcaacatattagtacactgaataagaaaaaacatatgatcacagctataggtttagaaaaaatcttctgacaaatttcaacacccattaatgacaaaaacactcaacacattaggaatagaagggatcatctttaacttaaaaagtatatataaaacatctacagtgaatatcatacttaatggtaagagactgaatagttctgcattaattaaagttgagagtgagacaaggatgtcctctctcaccactcctattcaacatcatagcagaagtcttagctagtgtgataatattaggaaaagaaattaaaggtatagatattggaaaggaagaaacaaaactgtattcacagataaaaattttgtctaggtagaaaatctgccaaaatttacaaacaaacaaacaaaaaacttccagaatttatcagtagagcaagatcacagcagaaaagattcatattaaaaagtcgattccatttctacatgccagcaatcactaattggaacttgaaacttcagaaaaaaatactatttgaaataacatcaaaacacaaaattaatttgcaaatcacatatctgataatggacctatattcacaatatataaataactcataaaacttgatactaaagagaggaatatatcaatttttcaaaatgggcaaaaactatgaataggtatctttctaaagaggatacacaaatgtctaaaatgggcatgaaaagtgctcagcattattaatcattagtgaaatgtaaatcaaagtgataatgagataccacttcacactcactaagatggctacaataaaaagatgaaactgattctaatatttatttggaaaaacaaaggatttaaactagtctacagaatactgagaacaaagttggaggactcacagtacccaacatcaagacttactataaagctctacttaatccagtgtcatattggcaaaagaatgaagatattgattaatgaaatagaatacagaaaccaaaaacagacctgtgcatatatagccaactaatgtttgacaaagtccagacaattcaatggataaagaatagtactcaaaaattgtgctaaaatttatgtcataaaatgaacctagatacagacctcacattttagaaaaaaattaaatcaaattgaatcaaagacattcatgtaaaatacaaaatgataaaacttctggaaggaaaacatagtagtaaatctgtgactttgtgtttggtgataagttttgtttagtttttgtgtgtttatttgtttgtttggagacagagtcatgttctgttgcgctggctagagtgcagtggtgcaatctcggctcactgcaacctctacatttcgggttaaagcaattctcgtgtcttagcctcccaagtagctgggattacaggtatgtgccaccatgcccagctaatttttgtatttttagtagagacggggtttcaccatgttggccaggctggtctcaaactcctgaccttaaatgatccacccacctcagccttccaaagtgtcggaattataggcatgagccaccacacccagcctggtgatatgtttttatatataacaaaacacaatccataaacaatgatgttagacttttttaaaagtaaaactcttgatctatgaaagatgctgttaagatattgaaaagaggagccacagtatgtgaaaaaaatatttgcaaagcacttatctgataaaagatttgttccagaatatacaaaataacactgaaaattcagcaatgagaaaacaaacaactcaattttttaaaaattgggcaaaagatctgaacagctaccttgctgaaaaagatatatagacggtaaataatatacgaaactatgttcaacatcaaatatcattagggaaatgcaaattaaaacaacaaagagataccattacatactcactacaatggctaaaatgagcaggggccggaggcagggatgaaattgtccataaaaaacattagtgaggaaatgaaaaaaaggaattttccttcattgctggaaagaaagcaaaatggaacaattcctttaaaaggtagtttgacagcttctgtacagtggagtattactcagcaatataaattaatggactatcagtcagatcttaaatgtatattggtaagtgaaggaaaccagtctccaagggctacatattgtattatcccatttataggacattttaggaaagaaaacacaatagagatagaaacacgtcagtgattagtaggggtttgggaagggtgaagatcaaataagtaaaacaatcacaatttttaggtcagtgaaactattttgtcttatattgtagtggctgatacacgacagtatgcatttgtcaaaacccatagatctttacagcacaaagagttaatctcaacatatacaaatttataaaatcaattgtaacttctggaaaccccagaattatgacaaaggaacctaatggtattacaagtgtctggcataacctgcatgaatgaattgggggaaaaagagatgacccagataagtttggaaattagtggaaactgtaagactaaaagcaaaagaaactacacataagcattgtactcaagttgagtgaagttgtttctcactagagaacaggttaaccattctaaaactgtgcacatatgctgggattgtacaaataaataaactgttggtagaggataagaaccaggtttctcactgttggagagggaagttacagataagcaagggaaaaggctacaatgagccatgtggtacaggatgagaataggaaatatcaccattaacttatgtttagcttgaaatagattacagatgaatatacatagaattaattagacatacgagtatatacataggttagtatacacagatacatttccctgctctgtccactgagatgacctagaaatactgacacaccaggggcagtgagcataccctggacccagatataggtttacaataccattctccaataacaggaagcagggttcctttgagaaactgctgattctagggctgagaaaggaaatataccagataaccctaaagtatcttgtgatgtcagaaagtaaggaagtgctcaaaaagcaaaataatagggtatgtcaaagtgtcaaaggaaccaactgaaagatctcccaatggccaaagctaaatcggtttgagcaacaaattaaataatatagcattggtctataacacaaagaataaagtaagtatctatgagtccatagagatatacctgcatgattgaataaatgaataaatgggaagaatggaaaagtctcttgcatagaaaaattacaaataattgctgtagatactcccacctcaaggaggtaaagtataactctctattccttaagtgtgggttgtgcataaggacttccaaaaaatatgttaggaaagggggataaagaacaattttacattgcagaaatctgacaaacaccacctcactcgtatgatcaagcttaatatcattgttataaatcatgctggcacccttgatctgatgtaatgacagtgtcactttatctctgtggctcccctcacccccaccaaaatctataaccccagtctaataatgagaaaatatcagacaaattcaaatcgaaggacattctacaaaatgcctgaccagtactcttgaaactgtaaagattgtcaaaaataacgaaagtctgagaaaccatcacagtctagagaagcctagggagacatggggattaaatgtaccttggtattctgaataggctccaggaacagtcaagggacattaggtaaaaactaagtatcctaatgaagtatggactttagataacaagtgttatctaaacacttgttatctaaacattgtgttaatacgactccatttgtagtaacagacttgtaatagtaacgtcaaaataggggaaactgggtgcagggtacatgggagcttggtcatatttttgaaacttttctgtaaatctacaactattctaaattttttttcttttattattatactttaagttttagggtacatgtgcacaatgtgcaggttagttacatatgtatacatgtgccatgctggtgcgctgcacccactaactcgtcatctagcattaggtatatctcccaatgctatccctcccccctcccccaccccacaacagtccccagagtgtgatgttccccttcctgtgtccatgttttctcattgttcaattcccacctatgagtgagaatatgctgtgtttggttttttgttcttgcgatagtttactgagaatgatgatttccaatttcatccatgtccctacaaaggtttttatttttacatctaacaaactttaaaaattttagaaaaaaaaactattctaaaatttttaaagtttgttagatgtaaaaataaaaaaacaaaataaaaattatttttaaaaattcattataattcttaaatcttgccatcagacagctactgtgggttttcaggtgtggagaaacgatttggggtcagctcactgataataatcctacgtttctcattgatataaacttctctaccaacatgtcttttgtgattgttcaagtcatttgccagtaagagattaggttggtgcaaaaataattgcggtttttgccattccttttaatggcaaacgtttgcaccaacctaatattttgctgttgtttggtaataagtacaaccacaaatcttcccataaggagtaacttgttatttaataacttaattttgcataacatcttgagtcaagctgacattgcatcaacaaatctgggaggttgcagactcacagttgtgaatatgattccagcccaagagaaattaggctttgtaaaatatgataatttacttatttaatgaatacttacttttacttactatatatcagaaactcttgtgaaaattttacaaatactataagttcttataaaaaccttctagtaggtattagtattatctacatgttagtgttaatgatatattcatattttctatagctgtgtattatctctctataatagataaacagatacgttaggagtccagttaacttgttcaagcccaggtagtttgcttccagagttccttctccttatcaggatgctatacttcttaacttgagatgattgctttggaagctcttaactattttgctctgctgtctttgagcattttttttttcctggtagtttaaaagacttcccgtaccagagaatttaaaccctagagagctaagtttaaaaagtactgatttctatggtagaaaccacattatcagaactcacaacctcaaggaaatgtaaatgaatctgaatgttatcaacagacagaacagatactctgaaacaacctaaaatttaagaattaacatcattaaggagcattcactcaccaagtaaaagtcacatgggattctgagaaccacaggcctttaactttttagatagcctgtaaataactatatgcctcccaaagaaatactgaaaatattataaatgatgtaagaagatacaagcattaaaaatagtatgacatgcgtgaacccgggaggcagagcttgcagtgagccaagatcatgccactgcactccagcctgggtgacagagtgagactctgtctcaaaaaaaaaaaaaaaaaaaaaaaaatagtatgacatgactgttttactggcatttagcaactgcatatgctattgtttatctacaacttatgcttccaaatagttgtatattggagagagtgggcgaataataaatcaataaaagggtctgcctttatcaaaatattgcaattaatgaatttttaatattttagataacgtgttttttcacttcactttgcttagaactttcttttaaaactaaattgaaataaaattgttttatttcatttatccactgcaattggaagggaaatatgtgaagttttaacgtaatttgagaatgataactgactggttaggggtaaaccacttattttagacatttacattttagattttatttttagcataattttattaatacgcacttcagatatacattgaaaaggcatagaacagatacacaaattctaagcttaacacctggtgatattttgttagacttgcttcagatctattttattcttcaaagaaatcaaataacctactaactccttctcactattttatccctggaacttactattgtatccggaattggtggatttcttggtctcactaacttcaagaatgaagccgtggaccctcacggtgagtgttacagttcttacagatggtgtgtccgaagtttgtttcttctgctgttcggacgtgttccgagtttcttccttctggtgggttcatggtcttgctggcttcaggagtgaagctgcagaccttcgtggtgagtgttacagctcttaacgcagcacgtctagagttcatcgttcctcccctccagagttgttctttcttcccagtgggttcatgatctggctgtcctcaggagtgaagctgcaaaccttccctgtgagtgttatagctcataaaggcagtgcagaaccaaaaagtaaggagcagcaagatttattacaaagagctaaaaaataaaaaaaaaatttaaaaaacaacaaaaaaaaacaaagtttccacagtgtggaaggggactcactgccgcctgggcagcctgcttttattcccttatctggccccacccacatcctgctgattggtccattttacagagagctgattggtccgttttacagagagctgattggtctgtttcaacaaggtgctgattggtgcgtttacaatttctgagctagacacagagtgctgattggtgtatttacaatcctctagctagacataaaagttctccaagtccccactagattcactagacacagagcactgattggtgcatttacaaaccttgagctagacacagggtgctgattggtgcatttccaaaccttgagctagacacagagtgctgattggtgcatttacaatcctttagctagatgtaaaatttctcccagtctcccctagattagctagacatggagcactgattggtgcgtttacaaaccttgagctagacacagagtgctgattggtgcgtttacaatccctgagctagacacagagtgctgattggtgcatttacaatcctctagctagacataaaagttctccaagtccccaccagattagcagatacagagtgctgattggtgcatccacaaaccccaagctagacacagagtgctgattggtgcatatataatcctccagctagacataaaagttctccgagtccccagtagactcaggaaaccagctggcttcacctagtggatcccgtgccagggccgtgggcagagttgcccgccagtcccgtgccatgcgcctgcactcctcagcccttgggaagttgatgggactgggcgccgcggagtagggggcagcacccctagaggaggctcaggccacgtgggagcccactgtggtgggggctagggcattgcgggctgcaggtcccaagccctgccccaaggggaggcggatgaggcccggtcagaattcaagggaggcgtggacggggcagctgtgctgggggacccagtgccccatccacagcttctggcctggtggtaagcccctcactgcccggggctggcagcgctggctggccgctccaagtgcagggcctgccaagcccacacccaccgggaactcgtgctggcctgcgagcgctgtgtgcagctcgggttcctgcctgcgcctctccctccacacctcccagcaagcagagggagccagctctggcctcagccagcccagagaggggcttccacagtgcattcgcgggctgtagggctcctcaagcaccgccagagtggacactgaggccgagcaggcgctgagagcaagcgagggctgctagcacgttgtcacctctcactattaccttgaagtcagtatataacattctatacatgttttcatgctattgtcacatgcatatactcatgagcaatgaaaaatattgttctgtaaaatttaaaatactacatgcatggttttgcactttatgtttactatcttatattaatttaatttacattttcaaatgtacttacactgatatatttaatttttaaaatgtcttctaagtatactttactaaaaattgccctccaaaatggcagtactaatgtacagtctcaccagtaatgtacaagtgtcttattgtgtggcaagagattatgacattcattaagtcctattttttttcttctgatgataaagctggactcagtttcctagtcttcctggcagctaggtgttaccaaaagacgatactggtgacatgagagtagaagagatgtgtggtccttaagttacagtgaccaataagtgaatcttcccaaaggtttatttacccatctatcaactgaatggagagttctcggagggccataaagaaagctgagcttcaagatgagagaaaccaggttttctgaatgacctcatcagaggctgtacaacatgtccactggactaggacataaaaaatgaatttttattgtatgaagctgctgcaattgtgactttcagtttcagctaatatttttagcttaattaatgtacattacccttcatcctcacctccttttgaaattatcagacttctgtctttttaatctattttaatttgtgtaagacagatggctatatggatctcagtatgatgtcaatttctatttctctgtactagtgaaattaagtagcattttccatgtttaacggcatattcttttctccttctcagactttcccatttatctcttgcccattttctatcaggttatttatttttttcccattgttttggaggcatgccttaagtattttggctactaagcgtttactggctacattcattgttaatatcttctgccaatctgtggtgtggattttaactttgttcatggtgttatttttttccacagattttattcattttagggtagtcaatttatcattcacttccttcatgggtcgtgaattttgtcttgttgatgacattaaactttgctctgtgtccatcaagggattttcttacagagtctcctaaaagttttaaagttttttgttgttcacatttagaatctgaaatgtatgtttttatatcatttggagtaatattataatttagtaattatttttagttgattctgtccacaatgatttgcaataccacttctcgtacagagaaaataatatacatgtgggcctgtctctaagctctccactctgtcattaacgtaatgtgcatgacagcaccacctttgtctattgaccataacagtatctcactgtcctgataactatatcactggtgtgcctatctggtgatatagttactccttttattctttttcaaatttataaaagtcttaaaacctattttattctgtaaaattttaggatccgtttgtaaaggtctgtgagaaaatatttcaatcatcttgtgattttaattggaaatatgttttatctatagattattctattgaaattacatccagtctttccacccacaaacatggcatctccctcagtatagtaaggttttctttagtgacttacaataaagtttaataattttctttatacacaggttttatgctttttgatccttgataccttctggttttggctccagtggtgaacagaatttttataaaatgcataatactttctaactggtttggactggtgcacagaaacgctattgattttgtttgttggtcttaaaaaatcataagtgtggtttcttcctctctgctgcctattttcaaatatccatggaacatgttttttcactgtttcttggtctctcttagtcttgatgaaaaacttcctgccagtttaattgttattccttcccagaaaatttgccgattctttatgaattcttgtgtttttcttggtcttgtgtgtgcagttttaccactacgtgtctaaacgtgtattggttatatgactaactattcacatgactatccctcgcaataaattctttctttgtgtcatttgttaatttttttattatcaactctttcacctcatattggttatttagtgttttgtgtagaaatctcgtgtactctgtgctctgaataggttgttacaaagcacccatcaggttatttgtgtctttcactgtcagaccctgagtagctttgggatattctcctatcacatatatgatataaattggaatccagacacacaaagggacatagaaagccctgggccctgcattcctcatgagagattttgttccatatcaagatccatgcctctagtcccagctactctggaggctaaggcaggaggatctcttgctcttaggagtttgaggctacagcgagcaatgattgtaccactgcactccagcctgggcaacagggcaagaccctaagtttataatgacaaaaatatgcttttatttttctcttctatggactaatggctaatgttagtatgttaatttactcctttttttttttttttaaactgaagagaaagctcgtctggggtcctagcttaatgccaggctgttagcatcctgtgaactccagtgctatgccttttaacaagtgcagaacaaaaaataacaaattatatgtccttaggggatttgaggagtctggcttctggttaaaagaactgtgtgtgatttttcaggtccaaacataggtaatgacacaggttttacctggctgccccagaggaaggctgccctccccacagcagacccagagcagggcccatgtgtggggctgtgagggagcttcagtcaaggactcagaggcttcattcctaggctccttatcagaggccttgagctgaggtcttctgcaggcaccaaggcctccttatgggaagaggagggggcaagcctggagacacatcccccctctgcctcagtgcccaggactttccaacccctagccgttcctcctcaccctctctgcaacctcagggtccctaatactgcagtgagacgatccccaggagccccaggagacccacctgacccttcaccggtgcactgccccatggagcaaaagggaacaggggagtcagtgctttctctttttttggcttcttgtttataccatagcagaaagtgattaaaggcttaattcattttggcttgttgatttggctaccccgttactcacaactgtcccaggttacccactcatcagcctgtgctttgccatcttagctttaattccctctttgtttctagatccttatttattttctgccattcaagctcacatattataggagcatattttatctagaatatctacaagtttgtaaccacagagatgctcaagagagccctgcccctacattagagaaataagaaccctcattttatttcttcccaaaaagtaaaggaagaagaacccttctggtaaaagtaaagggaacaatacaatgtagcaattccttaagtctacacagggcagaagagggaaaggaaatttaaactggatggcaagcaccttgtattaggttaaaatgaataattttcaggctttgagactcattatcaaaataagttgctgaatttgttataaatgttcttatctcagaatttataaaaaagagaagacacccaattcttagaaatgtcttgaggcctacctgtaaggaactgctaagcttccttcctaccatgcgtatccatgatgcctacttttgaaaggcttctaattgtataaattattttgtagctcacaaattttaaaatatatatttccagtgacaatatgctatcaaaggcatttaacttctcattggagaaaattaaatacatctatttaaaaattaagagcattccggattctgtgagctggacaagaagtaacttcacttattcttttgtttgttaaatacaacttcttttccttttttcatctctctccctctacatgaagacttatcccccgcctactgttattccttgatagctcccagagtatttgttttggtcaagttccctagaagcagaggctgtcatatttgtgtgtgtgtgtgtgtgtgtgcaagcacatgcatgagcctatgaaaataatttactaaagatgttctatcaggagaaacctataagggaaagagaggaataaaggaaagaagcaacagctatccagataggtgttccagatgaagtctagccccagcctgattccttggaggactttgaaacgtgaatagcctgcagggtttgttacaagtggagagtttttggtgccctctcatcattcaccctttggctatcaggcattgtctcccatgagagtataactcctcagatattgctgggtagcatggctcccactgaccaaggtgaagttttgagaagagaaggcagctgtgagccatgaacagtgaactcgcagaagagctgggagatgggtgcactggaaggtaaatggaatcttgacaagacactaacagagtctactacattacgattcatctttttgtcaccttgaggcagtaagaattaagatataataaagccaagggtttgattcctttctttgggctttgctccaagttgagaactcagaattctcaaatcttagataacatttttcaaaatgtattttaaaggcgtatgtttacttaattactcctgtatttctgctgctttggttttcctgcatttgatatttactagaagtaactgggactatggctaagaaggtagaacgggtttatgtggcaatgacagaagcagctatggcctggcctcctgctaggtcaaggtaggtcacattgcaaaacccagtctcagctcaggaggctcccaagactgagctcagaattaccatagagaagaagtctgagtcctgctttttgggctgtttcacatatgacaaagtctttactttggtaatgagggaagacactggtaagcagaggtctgcagccagacaaagttgggtagaaattcatttccagtagacctcagttgtgtgacttcaggtattaagacattgccagccaagtaagctgcaataaaaagttctgattgatagtctatgttctccagattttttgaatctggacttcaaaagatgtgtgcatcagataagtgtttggtgaacttctctatcattaagagatcactatattatagcattcctatgtttcctttcagcaagaaaaaacaactagaagtatcccccagctgcctgtgactactaagtaaacagcttttagtcacaaaaaaatgctatgagaatgataacatgccaagcctgtaacttcaaactcagaaaaacaaaaactataaagagccacatgattattcatttccttactcaacctatattattcatagcctcctgaaattcctaaaacatcatggtaggttttccttgcacgagcaatgatttctaatagtttccacattccaaagacaatgagggcaagaagccaatattccatgcacaagctctgtgacatgaaataatgtacggaaattactaccattgctgattaacactcattaagcgccaaaagcatttgactttaatttgcagttaatttttttttctggtttacattttattcactcgacattgtgaaacacatttcaaacaagtccactttatattcataatttgcatgttactgaaaaatctccagtgtagtggctacattgctatgtgtatatatagtacattatgcaccatctaaaagaaacggtaaataataatataggtgcaaattatggatttttgtttaatctgtcctgtattaactcattcgaattgtcatttcatattaagattcctaaatactagtgtaacatacttatggctgaatgaacctagtaaaagtattttcaggggaactaccacaggtcaaatttgtggatttctatttcaagaaaactttactaagagtaggagagataaatgaggcacagtctcttgaggacttgaagctgtagcacagcatttgtaagtgcagaatatagattcgaacttcctagattaaaattctctcccgtaagccatattaccttaggaaagtatttagtgtctttctgtctaggtttcctgatttgaaaatggggttaatcgtagcacctaacatgggggttaataaatgtgaaacattcagaatagcacttaaaaaagtaaacagtgaatgttctttattattactttggaaaaaatatattgcagcctcccactagaccatctaaactggtattgtgacttttataataagatatcaccaaaacaacagtgagatgaagagacaatagtaaaactttgccatttcctcattcttataggaaatggcaaaggtacactgtccttcttttgataattcttatagtcctctttcatgatatctaagatcaacaaagaaatgaggtaactactgaggaaaacttaatcatgaatctgtaagaaatatcatcttttttgcttccattaagtcatttcactattatgactcttcctccgacagcatgccagaagtgctcaatacatgtgtaagaaaattttccccaaatttgaaaataagcaatagaagtaatagggtgtacttttcacacaatgctgagtgttgactagcaaactctgtgggaacactctgactatagctatctatggaccaagctattaggttggtggaaaagtaatggcagtttttgccagcaaagtaatcccccaaactgcaattacttttgcaccaacctaatatttcacaattatataggagtggaagacagcttgcagaaaaataataagaaagcaaattattcttgaacatatgaagtttctccccattgggatataattgatttctgatttttagtcctgtaacaaagattacaccaaaaattacatgttattgacctataagggagtaaccaattttatattcattagaaaacttagtcattcataactgcctgtatgactcgtgtgtgtgtgtgtgtgttcttcaaattcttctttgaatccatctagtatcttactggttccttcattataatgaattgtataaaatatttgatgcaagttaaatatatatttgtatgagaattatgcatttcactattttaagttaacttttttcttggagataattttagattcacatgtagttgtaagaaataatacagagaattagccagctgtggtggtgggtgcctgtaatcccagttactggggagactgaggcaggagaattgctttaacccgagaggcggaggttgcagtgagctgagatcgcgccattgcactccagcctgggcgacaacagcgaaactccgtctctggaacaaaaaaaaaaaaaaaaaaaaaaaaaaaaaggaagaaagaaaggaaataatccagagatctggccgggcacggtggctcaccctctaatcccagcactttgggagaccgaggcaggtggatcggttgagaccaggagtttgagaccagcctggtcatcatgacgaaacctcgtctctactaaaaatacaaaaattagctgggcgtggtgatgcatgcctgtaatcccagctactcaggaggctgaggcatgaaggtcgcttgaacctggtggggcagaggctgcagtgagccaagatcacgccactgcactctagcctgggtggcagaacaagatgcaaaaaaaaaaaaaaaaaaaagagagagagagaggaaggaagaaagaaaggaaggaagaaaaagaaagaaagaaagaaagaaaaagaaagaaagaaagaaagatctcctatacactactcacttttcctcatcttgtaaaactatatactatcgcaaccaagatattgacattgatgcaatacagacagaaaaaaaatcccattaccagaagaatttctcttattaaccattgagaatcaaatccacctccctctcgtcaaaccctcctgtctctaaagcctggctctcactaatgtgttcttcacttccataattttgtaatttcaagaatgttgtatcaatggaataatacagtatgtaacattttgagattagctttttcattcaatataattcactggtcatccatccaaaccattgtgtatatcagtagtttgatatttttattcttgggcagtattccctgctatgtatgctgcatagattttcccagccattcattagttgaaaaatatgtgtgctgttttcattttgggctgttataaataaaactactatgaatatttatatacgggtctttgtgtcaacatgagttttaatttctctgagataagtgaccaagaatgcaattgctggattgtatggtaagtgcatgtttagttttgtaagcaaccgccatgacctttgcaagagtagccataccattttatgttcctgatggcaataagagtgattcagtttccctacatgcttaccatctgttggcattatcactgttttaaacattttattcattagaataggtgtgtagtgatatcttcactgtggttccagtatgcatttctctaatggctaatgatgttccacatcttttcatgtgcttatttgacatctgtatattctttttggtgaaatgtcagttcaagatattctgtttttgaggctgattttgagcattcattatatattccagatagtagccctttgttgaatacgtaatttgcaaatatgttctcttcatctctagtttttcaaagacagtctttcacagaagaaaaatcttgaatttgatgagatccaatttattaatttttccttttataagtcattatttttatgtcaattctaagaactctatcccagtcctaaatctgaagattttctcctgggttttttcccagaagatttatagtttttggttttaaatttaagtgtttaacacacttttagtttatttttgattgttgtataaagtgtgaggtttaaattgagatttttttttaaatgcttatgcgtgttcaattgctacagtacattttattgaaaaaaactcttttctccaaagaatttcttttcctcctctgtcaaaaatcagtctgtcatatttatgtggttatatttctggaatctccttttacttgtctatgtgtgtatctctttaccaatagcatattgtattgattactatacctatatagtgatttttatttatttatttatttattcatttatttattttttgagatggtctatctctgtcatccaggctggagtgcagtggcgctatctcagctcactgcagctttgacctcctgggctcaagtgatcctccctcctcagcttctcaagtagctaggactacaggcatgtgccaccacaaccagctaatttttgtgtttttttagagacagggtatcgccgtgttgcccaggcttgtctcaaacccctggactcaagtggtcttcctgccttggcctcccaaaatgctgagattacaggcttgagccaccacactcgacctacgtagtggaatttaacatttaatagagtggtgtctcccagaatatgtttttattttcaagaaagtttagctatgatttgaccagcatctttctatataagttttaaagtaagttttacatgccagcaacaacaaaagaccctggtaggattttttggggaattgtattaagcctataaataatttggagataattgacatctttactttgttgagtcctcaaatatgtgaacatggtatgtctctcatttatgaggtcatattttatttctgtcatcaatattttataattttcagtatatagagtctacaaatgatttgttatgtttatgtaattgtacatagtattgtggtttttgttttggtttccacatgttcatgttctttattaacatatagaaatgttattaatgtttttgtttattgatcttgaatcttgtaaccttgttgaattcatttataaagttctggaattttttggtatatatctcttgggattttctcagttacgtgatttgcaaataggggaaattttacttcttcctgtccaatccaatctaaatgccttcctttgttacttatttcttttcttcattttattttgctggggctataacttccagtacagtgttacataagagtagtaacctgttccagtcttatggggaaagcattcagtctgtcagcagtaatatcctgttaactgtcatttgtttcatagatgttctttatcaagttgaagaagatcattttccctaatatactgagagtttttgtatttaacataaatgagatttcaagtgtactcaaatgtttcttctgcatcagttgttataatcatgtgactttaacacatttagtgtggttatatggtggatacaatgattgaatttcaaataataaatcacacttggtcatgatttataagtcttttatgtactgttagattagattttctttacatttttttttttttttttgacacaggttatgttgtccaggctggaaggcagtgactattcacaggtgtgatcccactatggaccagcatgagagttttgacctgcttcatttctgacccgggatggttcacctctcttcgagcaacctggtggtctcctgctcatgggaggtcaccatactgatgaaaaacagtgtggacatctgactggcatggcacactacatcttagaaatccttggctcaagcaattcccctgcctcagcctcccaagaagttgagaatgtaggcatgcaaccttgccctgtagaactgccctgtagaatcaaatattaattcgactgagaatttttgtttaaattcattgagagatatttgtctgtagttttctttttttcatttgatcatttttttcttgttttcatgttcaagtaatattggcttcataaaatcaggtggagtatattcagttttctggaagagattgtatacacttggtagatgaattcttctttaagtgtttggtctagttctccagtgaaatgatctaggccaagaaattttattcagaaccttttaaactacaaatttatttcttgaatcattatggaaccattcccattatccatttcttcttaattaggctttagtagtttgtggtttttgagaagtttgtctgtttattccacgctgttgactttgagtgtgaaggccgtaatatcctgctgctagctgcaggatctgtagtggcatcctccgttttatttttaattttggtggtttatgtgttccctctttttacttttgtcactgttgctgaagtttaccaattttatagttttttaaaaaacaaacagccttttgttttattgatttttttccttctttttttttttggttttgttttccatttctctgtgttctgctcttatctgcgttattcccttccttatgcctacttgggtttattttgctcttctttttctagtttctgagataggattcaactactgacttgaaatctttctttgttctaaaatctaccttatctgatattaatatagccactttctcttttaaaaatagttatcatcatgatataactttcccatgcttttatcttaagtccacttatgttgttgaagtttaagagagtttcttataaacatcatatagctggttcatgttttttatctaatcagccaatctctacctcataattatattaagaccacttatacttaatgctaagcttaagtctattattttgctttataatttgttttctctctatttcttctgtttgttggttttttgttttttggttttatttgacaaggtctcactctgttgtccaggctggagtgcagtggttctccactcactgcaacctccaccttccaggttcaagcgattctcccatctcagcctccccaagaagctgggattgcaggtcatgccacaaagcctggctaatttttgtattttttggtagacatgggggtttcaccatgttggccaggctggtctcgaactcctgatctcaagtaatctgcccacctcagcctcccaaattgctgcaattacagacacgatccactgcatccaggcttttgttttgagacacagcttcactctgtcaccctggctggagtgcagtggcgtgatctcggctccctgccacttctgcctcccaggctgaagcgatgctcccacctcagcctcctaagtagttgggactacacttgcatgccaacatacctggctaatttttgtattttttttgtagaaagagggtttccccatgttgtccaggttggtcttgaactcctgggctcaagcaatccacctgcctcagtatcccaaagtgctgggattacatggttgttgtttctgtttctcttttcttgcctttctttgatttacttgaactgtttttaggattttatcacaaattatatatagtggttttgggttttgtgtgttttttcagggatttctctcagcgttacaatatgtgtatataacttatcaaatgctactgatatcaaaactttaccactttctgtgaagctttgaaactaacttctatttagatcccattctcctcctcatttttaaatataactgtcttgcatactagatgatatataattttgtttcaattatcacatacacatatgcaaatttattaacatatcttaggtcctcatttgtagaatggagatacttgtacctatagtacagggatgcttttatccctaaatgagataatgcatgcacagggcctggcatagtttaagaactcatgaaatgatgttattttattattgtcaagaacctatgccacatgaacaggtgattaggaaatacattacatgttggctcacacctaaggaataaaccaagtcatgacattgacaagataatttgcctgtttccaaaattgtagtgcactttcagaaactagattgccttacaaatttgaaagctgaactttcatccaagaacgtggtttgaaatacttgtatcagtgaaaaatggcagaaagaggaaaggtcaagtagtaaaggtgatagacaaaaagtagatagatcgtaactccatttctggtttataggacaagtcaaataaattattttcatgcaacattggtcataatagcaattgtcactcaccatttatgaaaaatgtcttatataagtccaaaatgttatttctatttttaaataggccaataaaacatttgagtattataattaaagtttttactttaattatagaactaaattgaaactaatgatctcacattatgacctcaatgagaccattaactctatcagacaaacacaccataaactagctgaagggcttataagtgtggactattgttttagattgggttccacaaaaatagagcctgagacagacattcaagtgctctcaggaaaagggaaatgaagaaagtggagggggctgaagaagctgctaagccagtatgtggtctcagctaaaactgagcttcaacctaatctgaaaggaagctctgaggtattactccatagacttgatgcctcctttaagaattggagcaggcctctggtacttctggtcggtggtcattagctatgggatactcccgtccctgtgcaaaaaatgtctcacagttagatgaaggataattatctggataaggcacagccctaaattgacagttaccaatttagctactcattacagctaggggttgggtatacttgccgctaaagaggactaggatcagtaagggaaatgggtattcttatttggaaccacaaaagtctctgtctctttgaagagtgtattggctttataggtaggaagtatgcatgtttatatgtataaaaaggcaatgtaatacattgcctaaattctgccaaagagaatctgtgcttgtagtccttaaactatgggtcagggtagggataaacatctgaaaagtgatgataaatactagagaactgctttcaagaaaatgcacaagcgtgtatacacagaatatttgcttagaatttcaggggttcttagaatgagttgatgaaactcactcacagatccatttgaattaaaaaattctgctccggaccatctggccttgatttggcctttacactagcattggaaaggtgattagagtctagaagaacaaagaaaacagtgaagaagcaagatatggtttcatattaccaggacaatggagagacaactgttgaaagaagttagtcataactcacaaggagaaatccaccaaactagatatctccagggacacatggggtgggtaaaaggatttgaggagcaatgaaaaaaggatttctagatgttatctgctgcagagtgtttttctatagctgtccacatcctgcccacacacaatgggcataatatccccacccttctagcaaaagagataatatcagttctcaacagctctgcaggcacccactgcaagcaagcataatatatcattgttttcatatttactatattagggggtagctttctcatcataccctggctcctcaatatgtaacaacaatggagtccaacagtgttctacaacccacctttctttcttcactgatctggcacaaaaattcttgccataattctatgaatgcacattacccagaggacgctctaaaacctaattttaggggaaaaatattcaggagtgcaatacgagcagtaggcattgagtgggatgtaaaatggaatgctgttttgagaagtgtagtgatgactttctataggtgccccaaataaatacattgcaggttttgtttatttttattgacatatgtaaactaaaagtaaaattctaaggtcccccaaccatctgagcagatgcctcctctcacccagggcactccaaatttaaccaaaaatactggttcagtctgtgacaggaagggagggtcagacctacctcattataccctactcacttttggaattcgggaaaagccaaccagcatttaacatctatacagaccttaggtctgataaggaacatttacaatcattctctttgaagtctgttacctggaaacttcatctgcatgataaaactttgggctccacaaccccttattataacccagacattcctttccattgataataactctttcaaccaattgccaatcagaaaatttttaaatctacctataacctgggagcccactgcccccacccccaaccaccaccactttgagttgtcctgcctttcttgaccaaaccactgtatatcttacatgtatttcattgaagtctcatgtctccataaaatgtataaaactaggctgttcccctaccaccttgtacacatgttcccaggatctcctgagggctttgtcatacgccattggtcactcatattaatacatctttaaatattttatagattttgactctttattgacatatatggcattcatacttaaaggtgtatatatgtcataaacttgattaattttctctgagaatacctgagaaaccaaactttacccacctcttagaagctactctgaagccccattttatggtcacagttttatctaacacctttttgaaggcactgctgaactggaattaattcagaagccattcacatttgtagctaatttattctgactatattcattctaatgctatcttattatctctgaatgcttttcctggtagttatccttcaatttaagggatgtgccagtcttgcaatgatacctcgtgattctcaccttcttttccaaataattccttttgttattgtagcttctcagcatctagaactctcgccattaaaacccccttcgtgagaaacagcaaagacaccttttcatcctgacctatattttaaggatcaattaagaggtccttgtctgggtaggaagcaatgtatctacaaacaggatgggaagtactgatcacacactgatacccacactcttggacaggcaaagtgaaaatctggaaaatattacagtgacttgggcaagaaaacaagctgaaatgttcattgaatcttcttcattgatttagaacctatgagtagatgttctttcattgctgtgaaatgtaatgacaggcagggcttcagatgaccatccccaaatccagatgcttatctaaagtaaacctgcctgtctgcaatccttttgactttcaaaaatagagcctgaattcatggggagccttgcgtcctaggcaatgtggagcagttcctgtgtttagtaaggaatatttcttaaggctttatttcttcccccgctttcctccaggttaaacccagaccctgaagacaaatctaggtcaaagtaaaacaaaaataaaaattacaggagcaagagtggggagaggtgttgcaaaaggggagaagtagaaaatctagggtttcatttgtgaccgccctgtttttgaattgaacagctttcccattgcacgcctacaccaatatccactaaactcttctgcttcatttttttatttagttaatttctttttattttttgagattctcctgatatgtgctggatagaaggtattcttattcagcaagacttgtccagagcaaatctgtgacaagataggcatttaagcgcagatgttctcactttctctctctgttagaggcaactgctatactgccaacaccacccaactccaaaatattgcttttaatttatccttttattttcttcattttttcctttattcattctttaaagattaattgaacacctactttgcatcataacttgagtgtcttaatgctcttttaggtaatctcttaagaaatttaggaaatatttgattaatccaccttcccaaggcaaaagatcttagtgttattttaattttcatataacgtgaatccttaaggttacaaaatgctttgatgtcagaatatcaaagcccagcactgttagaaatggaagccaagtttagggccctcacttctcagaatcccttaaacttatgacaataagagagagtggatttcctacttgaactttttgtaaaatttgtcctgctcaagagataatctgaacatacacaaattgagactggaaacttgatttcaagtcccttgcctctattttcctttcttctaattgattttttacacaaaaatcaaaatgctatctacccactaatatgattttgtaatgaaaatccaatcatgacagtcactacttaaaaccttttgagaaaaagctcaattcttctgatgacctttagcaggatttggctactgcctaccgccccgattcttctaattttcagtctccctgttctgtaattctgagctgaggtttggctgatatggaaggaagagagtttcatacagtcctgaaaagtacagaagaacaggagactgctgtgagaagtcaccagattttaaaaggcttcagaactattataaatataagggaggttcaaggtctttttaccagtttcttcttcaaaaccaaatttgaggaaatagaagtacttacgcctaaggtatacaatttgaggaggccctataataatttactcgtcttcccgtagtattagtgaaattgctgtttagttatttattgatgaaataaatatattcataaaaacttcaagaaataacaataggatataataatactaattttcaccagtcctaataaacttttttcacattgtattatttctgaaataaaagaaaataatgataataatgaagatgtagaaattcacggtgcattataatttaaatatttattcttaggactacactgaatactaatatgtcttatagtagttggtaattaaatttaataaaatatgatagccaattcttcctttcaaacctcagctttagcatatactccaatgataagtatttcttgtgtatacttctccatttttcatgcatatgcaattatacaagcaaaatgagaacatatatgattcacaattcaaaacttagcattacatgtattattatgcatgcaggaaaattctgaataatgtttctagtaaatatctgtgcctttaatgtgccatcttacttagaattttatcattcttttaaagtgctactggattttacttgctaatagtatattagtgtatcaacattgtcaacattgatatttataaattcattgtgcacagtttttgtagtttcttttttttttttttttttttttttgagacggagtcttgctctgtcgcccaggccggactgcggactgcagtggcgcaatctcggctcactgcaagctccgcttcccgggttcacgccattctcctgcctcagcctcccgagtagctgggactacaggcgcccgccaccgcgcccggctaattttttgtatttttagtagagacggggtttcaccttgttagccaggatggtctcgatctcctgacctcatgatccacccgcctcggcctcccaaagtgctgggattacaggcgtgagccaccacgcctggccagtttttgtagtttctttaatgtgacactagctttctctatgttacatttggtgtcataacagtaatttgaaagtttttctctctaaggtctaaaactgtttatctttgaaatcatatttctgaaaggtttaagagaatttatgtgtttataagtaaaatcatatgagcatagtacttttgaggagaagaaaggaacagtaggtagtaagttttttgtcaagtatgtcaatttgttccaaagaaatgggccctcttttctaaagttatcattattttttctagaaaatcacacatttcacccatgttttaaatgtattcacataaaattgagaaaagtattctttagggtgcttgtgatttttttctatatccatggttatttctgttttttcctaattttacatatttatacttctttttttctaatacatttggttaatagtttacttaactagatttttcaaagaatccgatcttagatttcttcatattggtaaatttgtgttttgttttgttttgttttgtttgctctccttttttgtttcttagtttcttcggttggatgctgagttattgagtatttcatttttgttctttctggtttagtgagctaaatttgtacagaactaggttatcttttttttttttttttgacagagtcgtgctctgttgcccaggctggagtgcagtggcacaatctcggcttgctgcaaactccacctcccaggttcgagtgatcctcccacagtccccctaatagctgagattacaggcatgtgccaccatgtccggctaatttttgtatttttagtagggacggggtttcgccatgttggccaggctggtctcaaacccctgacctcaggtgatttacctgtctcgacctcccaaagtactagacaatctttaggaattaagactaatagttttcctctgaagactgctttaaccatacccctttcgttttgatgcatagatttttccaacccttatttttctaaatgtgttgtagcttaatttctgatattaattttgacccaaaagttaaggagaaaatttccttaacatttttctggtaaggttgttttctctttatttaaataaatttctagatttattacattaagagcacagaatgtcactgagaatcgttgtgacctaatacaaggtagaattttgtaaataatttatggacacatgaaaagaaggtgtctttttgattttctggctatataattgcatatacttcattgaacttgttattaatatccttatatcttaaatatctgtactatttttgcacagttgatatgttttgctctgaaggaggtaggtaaaaatctcagccagtattttctaaaaatgtattttccttttttgagtgttagtttctccttcagattttttgggctatgtgatttggctaaaaaaaattcatggcatatattcattgtaatttatgccactttcatttttgaatggctatccttgtcacatgaattcaaccttgttggatactattactcttgcttttctttttctttgtccttttctactgtgtctttgtccatcattttactattaatttatctgtcacactattttaaatgccttttatttaaagtgctttgatacagttctgattttttaatgtaatctgagaatagttttctttttacaagtatgtttattttatatatattcattgctaagttaaatgtattttcttaggttcaccatcatattttatgctttctgtttttaatgcttcatttgcgtttttaatttttgctatgatttgtgcatttttttgttctgtggtctgaatgtttgttttctgatagtttagaaggttcatgatcttcagttttctgcttcttattttcatcgtttcagtgaacatagcaagacagagatgtttttgttctgccatatatatttaaactgtccattgatttaaagcattgatactttcttatctctgtcttatgtgctactttagagtctttaaactaaatattttgaaggttgggggctttgttggagctaacagaatgtcaccaaaagagcggaggatgacccaagatcactaaactactcagcctccacttcacacagagcatctccactttcatttattttgtatatttgttcatgaaagattccagttaataaagggcatgtgactgaaataagttttcaaatcactgatgtagatatctaaagctggtattttctattcaaaagtgaacaaatgcagtatcactaaatataactctgtcttcccattttctaccgtaagcagtaactttctgatcacttttaggctggtgcaaaagtaatcgcggtttttgttcttatttatgggaaataataaattaagtcactcctggtttttaaagctcaacaaattatattatctctgagtgattcaagttatatttaccaagtatggttcacttagaagaaagtcagttacttaagagaaggaagagaacagcatcgactactgtaaattgagtctatcttttgcccaggtattttccatgtttcatacaggctgatgattctaataaattgtccttttctcaagaaaacagctataatttatctatgattaatacaaataccaatgtccaggtttactcattcattcattcaaagttactgaatacctactatatgccagtcacaggagaagtggaaacaaataagtgaacaaaaacaagatgcctcctgtcatcaagattatttgctcgtcttctagtgggagaaacaataattgatgatgaagatttgtaggtcatttttggaaggtaaaaatttgggagctctgtatttcctgcacctagcccagtatctggcaaatgataagcactaaatagatatatgttgaaagaacataggttggggaagatggagaaagggaagctttgagttgagagtcacaaattatttcctcgaaagtcaggtaagattccatgaaaatttaaagaatccatgtaaaaaggacaccaaacgaatgacgaagcacacatttaatagaaggttgaagtagtgacttgtcaagaaccatgacaaatccagaaaggagtcggatgacagtcctcaaattccagatcaagataacatggcagagagtgggaatgtgttgacagtctttgagcaggtacacagtatgattgaagctatactataggaatattattgtgccagtagcatttgctgatcagatgttaagtttcccaaaaccgcatgggggaaatcatagctatattgtcagcaattctaaagcataatcagtgctgcaacttcccttcctttacataagactcaatatgaaaaattgctcatggaaatgagtatcgcccatcttgttttaagtgtttgtaaatggcatgattaataatagaaaatgttgacattaaaagagggacaataaaagataaatacatgtacatgaatgattaatcaagtcaatttcataagttaaaaaagattatataagaagcagatttggaactgacttctccacgttcccaatcagtggtatctcttgagaaattaatttcttagtgacattccacttctattttgtttttttctccagtagtctcccttccccctaaccctcgcctcagagataaagttgtctgggtttcctactcatttgatgacaatattctccttaaatttatgtattacacatttattcctttcctggtctgtgaaatccttaagagcagcagctttgtcattttattcttgtctcaacagtggcatggatggtctgtagtaggtagtaaaggcggtaaaattacatttttcatgtaaaaatcttaaacactgattcattatcattagagcagaagcttcaccactagcaatcttttttctgattaagctttctttgcctagtagttcattacaggaacattagcctagcaaattgacaattcttacctctctatttttttaatatagttggccatgtcagggcatgtttcttaatttccaagggctaccgtaacaaattactacaaactcagtggcttaaaattcaatagaaatttattttctcacaattctgggggccaaaagtccaaaatcagggtgtcaagagagttgtgttccctccagaggcttcagggaggattctgtttctcacctcctctggctgcttcactccaatctctattcatgcggtcacattgccttctcctattatttcttctcaggagaactgtcactggatttgggatgatctcatctcaagatcgttaacttaattacatttgcaaagactattttttcaaaataaggtaacattcacagattccagattttgacatggacatgtattttgggagtcaccattcaacctactacaatgtccctctgaagtttctggtcaatttttcattaatctttttcacagcaagtaggaattgctgattctaaatccactttgcccaatttagttgtagtcaagcctcagacccctaaatgtgaggaaaagttaattttaatttgtgtcacagacaccagaaaacctattgagaacatatgtaaacatatttacttatgaaaaagaattctccacttgagttttctctttttacaagtcagactcctactgagaaaagagtgatgcttacttttcaaatatttctggcactgaaataagtgaaccagctcccctcttttgtccatgtttctctttgcagactttcttgatttaaattatacattagttatgtgactttgagggtaagcttagggctaggggttaggcatatgagcggtgttaaggccaggactaggattaggactataattaagggttaagggtatgtttagaactaggataggattactgttagggttaaagttaggttagaactgaaactagagctacgtttagggttagaaccagagctaggctaggtttagggttaagtttagagttaagctaggatctgggttaaattggggatgagatctggcattagatgagggtgagatttaaacctaatgttacgatttgagcttaggttatattaggaacagtgtcaagactagggtaaaggtaaggtgagagttagagtgtgatcttgaccaaatcacattctctgaaatagtttcctcttctctaaaatgatgacaatgccacaagatctttggggtgttgcttctccagccagaaacctctgtggctggtttcacctttgcctgagttttggttggaattgctgggctcattccaccaacttggcctggcaggctgaactcagctcatactaccagccccgattccacacctgccaagaatgagccaggcatggagcagtgaggggtgtgtgagtgagcaagcatggggtccagccactgcgcaaagccaggcttgccagctgcagtggtgtgggcagctccaggtgctggcatgggtgctggctccctgagaggctatggctggaccaggcatactgctagcatcttccactgtgggcattgggaaacatggtggtgcccagaagcttggaaacataaggaaccacagggccccaaagagggtgtcacagccctagctcaggaagcttctaggtctgagctcctcaaagggcaacagctcttcactccttctctcttatcttcatctcattacccacgatgtggcaaggaagggggcatgtttcagccccgtttgtgttacagctctttcagttccaccactcagtgggtctgcatccaggaagaatgaggtacctggacaacatgagggtgatcaaaggaaagaagtgctttattgagcaacagcacagctctcacgaaactggaagcgggtagctcctttccacaggcaggttgtccagacatctgctggagtctggctgagtccaaggtttttatgggcttcagagaggaggaggtgtgtgctgattggtccaggggtgaccatgggtgggcctggaaagagcaccagaaattctcactccatcagcagaactgcagcctgacccctaggcttcaggccatcctgggcctgaaggtgggtctttcctggggacccacccctttctgctcaggggcctctctgcctcctgctgccatcaacctacagtccacagcacccaggtgcctgtaggcccatgccaagctgcccttacccccctgctcagcttcccttccatgctcattggtgcccaaagttcagagggggccaaggtggcagggggctggcatgtcagagctgccccaagcatgcatacacacagccgaggtgcaacaacacccaggttcagtttcaactttgcttcataattggaagaggcattaggagcggcaagaggccaggcaggggagcaggcacttccaagctggcagggaaggggggcttccggacccccgagagtgcaaagattcctggatgtgcagctgcaactgagtggctgcagctgcgcctagaagggtgaggctcctgcctgatcccagctcctgctggctccatggggtgcacagccctggtcatgccttccccactgcaagtggcgtcatggcagtggctgctccagataggccatcactgacatcaatgacattcaccttatagtgctcttatgtggagaaagtattctactccacaagaaagctcttagaaagctccaaattacaatgaaaactgatattattttttcagtattattacatgtatagatcaaaactgtatttgtccagagcaaagttaggtttgacatagtttggttaaggtgatgtgatttttttaaataaatattattgtttatagtcaatcctaattcattccaaaataagcattcactaaatgctgcatgctatatatattgtgcttactgctttaaagtgtttgcagggaaatgtgtttatatgacattgttctttctctaaaataatttcccatctctaatggtcagacaaacccattctgaaactacagtgaacatttgaaggtaatatgtgcatgtttgtctgtgtgtaatttgtttgactgagattaccattggtaaaaattttagcagagaagcacataaatgagagtggtgtagtcctagaaggctttccagaacacagattttatctgggctgaaaaactggcaagcatttacgaaggcaatgggagattacatattgttgcaagaaaagtggagcataggctgttaggcagaaatgaccattttatgcctaggggttgctgaacaaacctagactacaaccacaatgcatgttgtatgtgccacatactagtgggggaaatgtttgcgttattgtgctgcaaacaaacaagaaggggccttgaaaaccatggggtataatttggatgtttgtccccgcaaatatcatgttgaaatgtaatccccaatgtttgagctggggcctgatgggaggtgattggatcatgagtgtagatttcccatgaatggtttagcaccatcctttggtgctgtctttagatagtgagggaattctcatgagatctggttgtttaaaaatgtgtggcatccctgcttccttttctctctttctcccactctcaccgtgtgacgtacccgctcccactttgccttctgccttgaataaaagctccatgtggcctcctaggaagtagagcaggtgctggcaccatgcttcctgtacagcccatagaactgtgaaccaattaaacctcttttctttataaattacccagcctaaggtatttctttatagcaatgcaagaatggtctaacacaccaggcaaaaggtggtagactaggtgtcatgtaaaatattcagtgacaaatgatttctcagtacagtgttaacatatttcaaataagtggattacacataattattgtggtctgagaaatgagtaaggatctgaagtttgggaaaccgaggaagagaagcccagccaaatgcttctgtcaaggttgaagttataagtgtctgaattggctgatgggactttaaatggaaagagaaatggctagagggacatttgatagaaacaaatatcgaaatttcctgattaatgaaatgggaaatatgatgatagggaataatgcaaggttgccttttgatgtaggctgggcatgagaaagaacagggtaagaccactgacaaagatggacaatttagctcgaatttaggagaagtactttagcagaagtactcgcctagatttatcaattttaagttttcaggacacaattaattagatttagagctcaaactataagaacacaaattcaaatcctttttgatggttcagaaaactcttcaagaccatggatacatacacttcttttgctcccagtccacattcagattagacaaacttttagagcaagaacttttttcttaattactgtgtgatacgtgtttcttctttactctgcatatgtgaggtggaataacatgatgtttacctgtgtgttcacttgtatctataatgctcacataatcttacacccattccttagtatcaatctgtgtgttgaatgtgtgtgcaactgtgtgtgacaagaggataaacagccacagatgtagagcataaaaatagaagatgaatgtatttctatttcccttgtatattacagtgaatagtagttaagagacatgacctttccttttctctgagtccaaattaaaaagtcactggggcctttctcatgaagctacaacttaagaacctcgccctatcctgaatgttgaggtgtggtatgaccagcatgagtttaaaccacctccctttactcttaagattctcaattcaaggaaaaagctagaggttggaacaatattgttcagtcaacaccctctcaaaccctggtgaggatgaaagggtccatagctcctttttcattcttcgtgacagttaagcccttgcttttctttaatacagatttaacctagggcctgttctttttcaatgtgatccacttggccgcacccatttggaagagcctattactctggtcagggttggtttggcttgctacaagctcttgctgcattctttttttagagcctgccaaatgtgggacaatgggtgtgccttgttgacatcctgtggttcatcagatatgtgggatcattctgcagtgcaacctctttagacgcttacagctgtgctaggaggtccaagtcagcatgtctgagaggaagcccaaactctggttcacatgaagggtcatttaaccaaaatgcttgtgggaaatgggaacacgggcatgccttcctttaatgaaatacacggggccctcttcatacctagattagtgatttgctattgcaaatatttgcctatctctccaaaccatagtttatcccaaaaagatgactatattacgtaggcatttagacacaagaaccacacacaagatggatttcctgtcagttcggatttttaaagtccatgttccatttttgatttgccacatgaagacaaaaagctactctcaaggataagttggagattcggggaatattagtgtgcagttaaaatggatactccatgtgggaaagacccagaagacataattttggactggagaaggcaaggatcaccaggagtttgtcactcaaatatgttatctaacaaacccccatcttctccacaattacaggtttaagttgattaacagtctaatcttattaagtgcaaatgctctctcgggtggttagacttcactcacatttcattatgaagtatttcaatgagatttaagcttctctttctgagaacctgggagtcacaggaaattggagtgttgagggagaaggtgaggggtatgcttcattcctaaatctattgcagggagtataatcatcattaacatgaatgaataaaaataaaatcacagtttctctctgatcaggatgcactgaatatttttaacgtgagaaatagactctaacagaaagagacagaaagaaagagagaaagaaatagagagagagagaaaggtgtaaatcaaatgtggcaaaagttggtgcatttcaccacttgtgcaacctttctgtagatttaaaagttttcaaaataaataattattttaaataatgaaatctcacacctgatgagtttattttgaaatcatcgatgttgtcagctaatggttgatgccattaatactcatttttcattcagcaaaaagaatgggaacagtatttatggaggtgaggaagatgatattacagaactaggaggtaaaataagaagtgtattggaaccagaaattgggaggtgggaagtaggataggagactgaaaatgaaaataagatagaagaaaatagaacatttccacactatcaatttcactagaattcctacctgtgaaatttctgccatggactgaggtggactgaacctcaaatagtagatccaccctggattctgaagttgaatttctcatctttcctgatttattttttgtctcatatttcatttcttcaagatagatgattgttttctccattcagcacttgtttccccaattaaaaaggagagaacctttgatttgtctcccttgcttctcttctttcatcaattctgacctgcaattctgagagtgccttattttaacatgatcagtgaaggtcatgagccacctttttgagcacctgtgctcagcatctttcacacaattacactaattttcacaaaagagacaacggagggtcagagaagttatataattcatccaacttcatatataatacattccaaagctgtgatcacaatccatagcggtacccttccaaagccccctgttttgaaggtaaacacgacattttggagaagtggcttaaaaggaaaggaaatcaaagggctgcaaacactctatacttaattgtaaagaagatttaaactttctattgaatttcatgataaaattaatgccaatgccttgacagaaatgaaaagtaaatctttaaatttaagtaaaatacaggttgaaatgattttcatagctctcccacattgatttttgttgaattaatagacttacctcaggatgggacttggagacggatgacccaattctgagctctggtcttggtctgtgccctgggaaaagtctcttcaactgtctccaccttgattcccctcttcgtacagtgggcttagcaagaaattcccatcttttcttcttctcaggagctactgtgagcactgagacagtgactgcaagacacttccccaatcttcctaaataaagggcagcctacaattgttattattacttgaggcaaacataaaaattggcagtatttttgtaccattttcatgatactcacatattttcttctttatttttatagcataaaatatcaaaatccttagaatttctcctacgactgtggtttcttaatgtcataattttaaaatctgaacttaacttcttgttcagttcaactatttccaaatcacaggtgatcatagaaattatttagatattaatcaactttctaagtgctgatcttcctttctcactacagaacataaaaattaaagaaaaaaaactctgattcctttaacagactatcattgggcaaaatagagcagcattccttagaattttggatttcatggtttactaattttatttataataaaatgtgtgcatgtgtgtaatattctatttggccaagcacacttgcatgcatgcatgcacacacactccaccaatcatcaactatcaaagccattttctaaaagaaagggcaatttaacctataaactattctccgaataaaagaggaaagttctcaaaaattaaaataaatttgatatcatgaaatattgcttaatcattgtttttctaaattcaccacggtccattggagacctttctacacatgctggttcatatatgagctatcagaagccattgaacttgcagacatattaagagtgaactgccccctcccaaattaggtatttgcccaccatccatccaaaggctcttaaactgccactttcttaaactgacacttggagccctccttgctttcctaaacaggtccatttttaccctggtgtgactgtttccttccagagaaaatcctgctcagtcctgtcaggtcctgtcacaggctttgtgaccatttagtaagtaaatgttggtctcagttcagtttctcttgtccaaaataaaggaaggaaacatgtctttcagggttttgactttatacttgcttttgtgatgtcttcctttttattcaataaaactgacaggaggtaataccgattctgctaaagaaaagacaatttgtggaaaaagaaacatctttaaaatactctttcttacttttatttttttcatttggaaagataagattgatttaaaagatgaaaatatcttatgttgtcttttctcttactgtttcctcatatattttgggaacacattctctgagaaccatgtaaaatatttttgagataaacacaattatccatctaactggattgtttttccacagctagaaattcaaaagaatagattaatttgaggattaattcagtctttacttgggaaaaaaatttaaagaggacgtcaagtgtttttggaaattgaaataaattaccggaatgaaaatgtccttcagtaaatataagatattaaaaatataagaaataagagaagagttttaaaaatacatatcactcccccattccacacatcaccttagtcttacaaattaacattcttctgtatctctgagtatgttcagaaagattccacacttggacatttcttatcacatacatccagtcctcaaggtcatgtcctgtagccattcttctctgtctctaaagtaatttgcagaattgggtgtagtctagtgtatgctaattcttcattattttctatcccaaaaggtcaaagcataatatggaaattcttgaacttgaaagaggcactcagcctacataaccagctctgcccaaattaaaacatccaaaaataccatttattcctacaacagcaagggctgatggtaaacccaggggagtaagaatatccactaacatgactttgaaattgttctatctcagtgactccaactttcccagatttcaacaagattccttcagaattaaaaaagaaatgactgttttactctacaacttcagcatctgtaatctgataacttctcctgtaatgagataaattctacagaggatttcctactatttaactagactggcaagtcagaaaactggattttgtccctagaaaatgatcgcaaatctacatctccaggtttcccccatgttttaccatttactagcaagaatttcctcaattcctgagagggtaagataaaatatgggcacacagaacaatctaagaaatattagaaagcaccgttaatattatgccaatatgaggaaactggtccatttttacaagagcttgcaacttgatgggtactgagtggcatgagctgtagtcaaacatacatagtcaatcacagctcctcaatacccttggtttaaggagtctcacttcagataagcagtatgaatgaaatccttctgaagtaggatcaaattctatgaattttcatatcaaaatgatgataaattataataaataatcatttagaagtctggcagtcttatagacaccttccaataaaatatattattggttgagggcttggggcataattgtagaagttatctgcatttctattacccaatagactattcaaagttgataagctttgatactgattttaaacaaatctgacaatctcacctctttgaacaggacttgttggtatgaataaagaaaaacatgcccatttatcaactttataaaccttcatatgtaaacagaagcaggctaacaatatccacaaataacagaccataattttcagtgtaaataatcactgggcccaggatttccatccaaagcacaccacacaagaccatgagcctatctaagttcaggcatcacgtcatttatctggcacatctagcaatatgatcaacatatagcagaagcactgtaagtgttaaactataaattctatagagacatgtctgtcatattgcctattatagcagaggacctagcagataataagatttattaaatcgatgtgatataaatgttttagtgggtgaatgaattgatgaatggtttgaattaggtaattagtggacaagagcagagatgtttcaggaggagataatgtcatagaggcagttgttagtaggttgaataccatgcatggtaggtagatttactcttggaggccatgggaagtcattaaatattcttgagggaaaacagaattggtggaattgttatctgagaaatattgcagtgttttttatatgttggattgagtaaggagagagtaaagggagaaagagtcaaatatatccataagctttaacacaaaagaagtggagaatgtcaccttccaaatatttctcatttctctacctctctcactctcctttctaccttctactacactatttaaatatattcatagcttaggagctttctcctccactctattccataccactagaattatctttctaaattttatttttttaactcatataaccagaaatcttcaactgttctccagttcctaatacatcatgttaaaaccttcagactggcattgtaggctacaaacataatacactacaaaagctgtacactggtgttagaaaaagagaaagtttaaatccctcaggttcaaccacttactaactagtttcctcaaccaagtatcaaactaggcagctcctaaggacctttctaatttagcattttatattttgtttgactttgtctttgagggtgctctttatgtaacctaaaccagtgcctctcacacttcactgtacatatgaattacctgggaatcttgttaaaattcagattctgacttagtggaactagagtggggctggaaaccctgcatttgtaagaagcttccaggttgctttaatgattctgctccatggatgatgctttgagtagcaattccctatttgtagaaattcatgttggtaaaacagtatctattgtatccttttaaactttgttgaatctgttagtaaacttggaatgtcctcctatccatattcacctgtcagaaactatcccatcttttccctaacctatctcatcacagctaaaacgctgtcatctcgatagagttcttaatccaatcccttactcacaaaggaagccatcttgctttccctgactttccatagctctctgtaggtgtcttttagcatcatgaaaaccttgtgttgtagttatttgcatatgtgtctcttgcctccctctaggtcataagcctcctagtaatgcaaacgatagctgccacttttgactaaagtgtagaaggaagaacattctagggagaggggggaggggacatggtcacactagtaagtgtcagggaaattcaaacctggtacattggactccaacacatttccttttattacacttggcaggcattgtaatatgcatggctgtatcgtcagaacacaacacctgacacattgctggatttccatccttgttgacatttggcaatggagacacattagaagaaatgacagtcttattttttgcatgcttaactttaaagtgttggaagacagcccagtaaaaacattctccctgcatctgcaatttgagaggttaggagacatccagaatgagtggagctgggagtggtccatttagggcataatctgctttattccacctacagaggtgcaaaattcatctatatcccctcagtggctcaggacatttttatttcttaagacacaagtatagcagtgcaatacatacaaacctccttttaaattactgggtcctggcctcattatatttggcatattatataaagacaagaggccatttgacatatattttagtataatgccagttacatctaaaataataaaacattaatcagggcagcatgatgttttacaaatcatgaaaaatatattgcatctttaccctatgatctgtctcttttgtcatatattttattgcttgggatttatagggccatatctctacgtggcttatgcaacaacacacatcaatgtgtctgccttcaatcatcaaagggcaaaaattcaggtcagacattagtcatttgccaagctcatctggattaatgaaagtctagagcttgcaatcagcatacagagagaacaatgaaggtatgtctgtaagtaatgtcaacttactcctgaacttgtaatacccagacttatgcctgctttgcttttaaatcaaaacataattgactgttgcgatacaaagatttttttccactgcagctgttgttctaatagctaccatagccctacacaaaccatagccctacactaaccatagccctacactaaccatagccctacactaaccatagccctattaattttcacaaaataagcaacaaacctcttcatatatctggctcattaatttctgatggaagtagagctcctttgggcaactttgaatggagtaaatagactcttaagtggaagtgaatgttgtcatttctgttggtactctccatacaacatatggcctgaaaaaatgaaagcttttaaagacctgtggggagactttccaatggagtaaaatcattgtactctgaagcactttgcactttttcccaaagcaaatagtttataacatttaattctcacaatcatcctgtgaactcagcagagtaggtgactctatgtctaatcaacagctgtgtaaactcagcccctatgatttgcccaagattagaaagattgacacaacaaaacagaagtcctgggctagaatggtgccttctccactgtataatcctttaagacgataatatgccaggaggaagtcaataaatggtaactgaaagatccagaataagctcaaatgttccagaaataattaaatgctaatgaaggactagagttttcttagctggtgagttaattgttgaaatgagttagtgaataagcattttcaaaatactaattgaagacaaagaagaagaaattatcagcatcatcaaatcctacaatgagtgtctaaaaatctcaatttatctctacaactttactcaatgtcacagaagcttctaataagggcttgagatgacaaaatacctagactctatagttaataaaattacattcagatcatgctactctccaagtaaatcattctttaaatgttacctcaagttatggcctcattggtgctttaaaaaacacaagcaatatacaagaggtaatatattaaacgacttaagagaacagatttgtagaattgctttctggaaggatatttaagctttctaggtatacaatttatgatatttaaaatgtgactggtattagttttaaacaagttaatgtacataaaacttactttttgcctggaagatagtcagtgctcaatacatgttagccaaacagccttactagtatctcttactctattctatgtgcctctagaactgaatcaatgctatctatcctatgacccaatattgaaagaagtgaaccagatttcagtgggttctttcctccctgctttgtcagaaaattgttagataagtggcattgaagatcagacaaaagcctctttgtgtggcttttctccagataaaatgagaaatagtatccaatataatcagcaagataaattaaaacttgaattgtccccaatgaaggaaaggtatctttcataactgctcattgtaaatagtggcatcctgcaggaatcccttttaaatatttactcccagaatcaagttattaaaaaaagaaaaagaaagagagaggaaaggagggaaaacaggaaaggaaggatgaggcaaggaaagacaaagaaagaaaaggaaagagagaaagtaagtttgaaaaattaaatagcattccattagctacaagatcaatgacttttccaagtaaaggaaaggatcttggacaaagccagaaatcaaaaccaaagcaaaacacaaacaacaattttgaaagggaaaatgtatttataacatattagtctttcaaacctattttgtcagttattttccagtgccactaataaagtaagtggtaacacaggaagaaaaacaatactctagggccaactattttttcctatcatgtagtcaaggcttttagacacaggaagattctgtgttctgtggagaagttataatacaatagtgtttgcaagtgaggttcatcccactttggggcaaaagataagaaaatgggcaccttgctcatgacatggaatttcattcttgaatgacttggtttggagactctgcctttttggggtgatatttgcacagtttgcttcctttagagatttgactcttcaacatatttttgaaaacatttcatgccattacagagtagaaaaaggagagaatggaaatttgagctagagccgtgaataatttatcctaaacttccaggagattccgattatttgatatcttcttcctgagcaaagaatgctcttgttaaggaggcttggtaaacttatcattctctttctaatgtccttttgtgtaggctttcatgggagggatgctgcagacagatagaccgcaggttcttttagacaagaaatgggaactatagcagaatgttttctaggatttggcatattgaaataattcttgtgtgcgctctaaatcaggatccttcagtaacggtgatgatgatgataatgatgatgcaataatatttactaactttttattttgagccaagtttcattgtcagggctttgcatgcaatatctcatgtaagcctcacaaaaagacccatgatctgtattaactttattggatacctgactaaactgagcaaggaataatgatgcagaacatggtacaagcctttgtttaattaatgtagaagtactaacaacagaaaaatacacaaaaaatggtccatcgtgtgtatgctacagcttagctctcaagcttttttttttttttcctgagattggggaatggtaggaccattgagaatacatcaacaactgaaattatggctatcaatgactctggccagcctactcaaagacatacttcccatgaccaagtggcctctttgctgctgccagaagatcaactatattgacaaaaacaaaattacagaagcaagatttactgttaccagactgtttgtaatttttcctttccatttgctcctcttttatgatccctcctttttttccattgacaatcatctaattacttttctcttattagtatatttgtaagtacaaaattatatataaatttcagaaattaattataattttctgagttattctttgacttgcatcctagaaaggttaagtatcttgcacaagtaataaacctaataagtaagggagcatgtattggaactcaagcagtcttatttgcactagataatctcctctacaaaaaaaggtctaaagtttatgtgcctacaaaaaatattaaggaagttccaagtgagaaaatgttaccgaacactggctctaaagttacaaaattagtctctatctctctcactttttttctctctctctgacacacacacacacacacacacacacacacacacttcacacacctcataaacaaacaacccaggtttcatgtgatacccttttgtgatttctattcaatttcaagcattcctttgatgtttatttcagcaagtttctgcaaagagcaaaggcaaatatttttacaaaaacagaattgttttttacaaaacaatatttttacaaaaacagaattttttaatagtattaaaaaattataatgatattcatagtgtgtaggagacctcacagtatgtgggggtggaagaaagaacatttgtaactggagctaaggcaatgtgcatcatgtagacatccagtgaaggcaggcaatgccaagccactctgcagtctgagaagcatcactcactatgtccacccttccatgaagattcgccatcttctcctcctcagtaatttcctaaggtctttatctccatcataaagctccaccagcaccttgtgaagtctatctttatagccgtcaaagcacttttcagccatattctcaagagcaaacttgctgcacgctgtttccaccttcccctctagtttcagagcttccagagtgcaatgtcagtagccaataccatagccacattcctcactgagccttacatatggcatgtgcttgataaatatttatagataatagaaatctgaggcctatacccagtggttttctagctaatttagtaactcttcccatatttccttaaatataaacaaagacaagttggcaggaaccaaccagaattatgtgatccaatctatttgatagcagaagttgttctttccaaatgggaaatggtcttggatttctgctagttatctttttcattctccatatgtgccacttatttcttcccttcacttacatattgttggtgacctctgaatagatgtcaggaaatattcctcaaaataaagatttgctaagttactttcaagtgtcgcaggagtaagaagcagcattgtgttaaggcagagaaattagcataggggctgcctttatttttattcacaaggctgaatatagagattagagatcctacccaggtaatgattaatgctgggtcaagtcagaataaaatttttgcactgattctagactgtttcaattaaacatgctcttaaaaaaactcttagttcaatacctagataatttatttccagggctaattctcaaccaaaatcatagctcttttaaaactaatttgataatgatctaaatgtgacaggtctctccatatcttctaaaaagtgtgatgcagactttgttgcatttaaaattaggatggaacaaacaaccccatcaaaaagtgggcaaaggatatgaacagacacttctcaaaagaagacatttatgcagccaaaagacacatgaaaaaatgctcatcatcactggccatcagagaaatgcaatcaaaaccacaatgagataccatctcacactagttagaatggcaatcattaaaaagtcaggaaacaggtgctggagaggatgtggagaaataggaacacttttacaccgttggtgggactgtaaactagttcaaccattgtggaagtcagtgtggcgattcctcagggatctagaactagaaataccatttgacccagccatcccattactgggtatatacccaaaggactataaatcatgctgctataaagacacatgcacacgtatgtttattgcggcattattcacaataccaaagacttggaaccaacccaaatgtccaacagcgatagactggattaagaaaatgtggcacatatacaccatggaatactatgcagccataaaaaatgatgagttcatgtcctttgtagagacatggatgaaattggaaatcatcattctcagtaaactatcgcaaggacaaaaaaccaaacaccgcatcttctcactcatagatgggaattgaacaatgagaacacatggacacaggaaggggaacatcacactctggggactgttgtggggtggggggagatgggagggatagcattaggagatatacctaatgctaaatgacgagttaatgggtgcagcacaccagcatggcacatgtatacatatgtaactaacctgcacattgtgcacatgtaccctaaaactaaaagtataataataataaaaataaataaataaataaataaataaataaataaaattaggattgaatgagcttatcaaatgagttatggcagagctaggaatcctcagaatctactgctctccattgcttttcatggggctccattaacattgctgagcctcctgagcacagtcctggggttggatcattgcaagttctgggatctgtatttggggggttcctctagtgctcaatcctttcatatgcttattgatgacctcttctaaattgagatatctctttgctctggaaagcttagattgtccttacccagtgagtcattagtagtctgtgtggccatatccttttgaatctcaagcgtattactattatcttcaagatgaacacaaataattacaatttacttttgctaaactgcactctaaattatcatattaagtccattggaattttagtgcacctttagaaaaaaaaattctgagatctaagataccaaaggttttgggaagattattttttaactcctgttttttgaaatgtacaattaattttaaatactacttataaaaatattagctttgttaaaaagaactcttatttctctacagaaagataactaactgaagttttactaagaaatataaaactcagcccatcatgtgttaaatttgttgcaactattagcctgcctactcaactcttaatcaatcggggttttgtgggtgggacacgaagaccataaagggtttttaatacagccatgggtatatgatttcaatctggctgcctgagagtcaaataaagcaataaactcacagaaaattacacacatgtacatacatgcacagaatcagatttcttgtttctttttttttttaattaacttatttttttttagacggagtcttgctgtgttgcccaggctggagtgcaagtggcctgatctcggctcactgcaagccctgcctcccgggttcacgccattctcctgcttcagcctcccgagtagctgggactacaggcgcccgctaccacgcccgactaattttttgtattcttttttttttactagagatggggtttcaccatgttagccaggatggtctcgatctcctgacctcgtgatccgcctgcctcggcctcccaaagtgctgggattacaggcgtgagccaccgcaccaggcccttattgtttcttctttaaaagatctgccaacactgggttcatagttccacaaagcaaccaatttgtagctgacctatttcggtgatggctgggcttttgagtatgccacaggctataccaatcccaactgtcttaaaaccactggtttgtctaacctgtataacccatataggcacttgaatatgagaccctatcactgttaatttgtataaaatctttgtaatttgaacatgaaactaatcattgacactagatgttcatgcctagacagtataactaaccttccttcgtactcaaaatactccactttttctgctttgtacttaacttgaaagacagcacagtagatgtataaaaggaatgaacagcaaaagggtcagttgcatttgaagcaatccacgattgtttatgctggcatcattttgccctgaagatttttttctatgactttctggaagcattctaacataaagcatttttctggttttcagattcaaacacattctagtctaaccacctgtgtatgcaatcgatttggttttaactttgagcttcatccctgaaccagacctggcatctgcagaaaaaaaaaaataccagaggctaaaatagagcaagcagggccacaaaatagtgtgatgttctcccactgtgattcgtaggggatgcgtttcggggtgcgcatttcatctcacgagactccagacaacagaggagctagacaaaaggaaaatatgtgatggagctgtatttatattgcaatctttccaacatttcaggagggaatggtttacagatgtataccctccaatgacattgacacatctattgttttcttaacctccttccccatcttactacaagattcttttcacgaaaaagattacaaactgcccccatgcttttctatgataaggaacacatgccttcctgattacaagggaagacctgatgagctatatgataggccaagtgttaatgtaaaattagcctcagaaaatggaatacttttatgattacttaagcatttgtattttcatgccataaatgcttccccgtctgaaacagaccacttaacccagtcttagaacatcaggctgctaatttacacagtattctgacaggaagccatctacagcaatgaatgcacagtaggggattttaacagaagcccatctggactttcagctattgcaggcaatttcttctgaataatccattaaagagaaatgccataaagatgagttagcaactcttgattgtaaatttcaagagaggttttataaagagcctcttactttttcaactttttaagatctatttttagcgactcaattcatcaccatttaacttggtgtctttctgccttgttacgactcttgaagagtttacagtgctgtcagggtcacagtcgttgtcttcaggaaaggatacctgtctcagacacgtgctttctattaatttagccctccggattgtgttaggatgaaatatgtcttcttcagagtgtttttgtttgtttgtttgtttgtttttccatttcaagatttttttttctcaaaataattctcctctggtcagccaatattcaaaacttaaaaatgatagaccaattatttggtaaacctgaaatttgcggtgctgacaggaattattttaaataacaatataagcacccgcgaataactctttcttcctctggcatgtctttccctcagctccctcaagtctgctcaaatcatgtcttctcaaagaggccttctttgatgtattgttttatattgtaatcttgccccatccctggttctaatgattcccctgccccacttcaagtcattctgatatactatgtatttaattatttgttgcatttgtttatttatttatttttgatacagagtcttactctgttgcccaggccatagtgcagtggcgccatcttggctcactgcaacctccgcctcccgggctcaagcaattctcataccgcagcctctggagtagttgggactacaggagcgtgccaccatgcccggctaatttttgtactttttttttttttgacgaagtcttgctctgtcacccaatctggagttcagtggcgcgatctctgctcattgcaacctcggcctccagagttaagccattctcctgcctcagcctcctgactaagactgggactacaggcttgtgccaccacgcccagctaattttttgtttttgtttctgtttttattttgagacggaatctcgctgtgtccgccaggctggagtatctgctcactgcaagctccacctcctctgttcacaccattctcctgcctcagcctccccagtagctgggattacaggggtctgccaccacgcccggctaatgttttgtattattagcagagatggggtttcaccatgttggccaggctggttcaaactcctgacctcaggtgatccacccgcttcagcctcccaaagtgccagaattacaggcgtaagccaccacacccggccaagttttgtacttttaggagagatgaggttttacccatgttggtcaggctggtctcaaactcctgacctcaagtgatccgccaatcttggcctcccaaagtgctgggattacagggatgagccaccctgcctggcctatttgttgcattttttatctttctccacctgttacaatgtgagcttcatgagaacaaggtttgcactagttcacctgcttctgtgtccctagaacttagaatggagcatagcacaaagtatgtgttattaaaaatatttgttgaataaatggatagataagagtagatgattcattcggcaaatacagaaaagaaaacaaagctgtgatgacagatctggaacgaagaacagcacacgccacgctctaggtgctcaagtagatgtttatttaatgaataataaatggatatcataataatacaaatttagcaaataaaaacacaacaactaaagtaaaagtgaaagacttgaggtgagtacattcccaatatctgaagagaagttattagagatacaaaggataggattataaaactgggttttcttttcagggcaaatttgccaagaaaggaaagaaggaaaatagaaatcagatggaagaaatgttttaatgtgagtgtttcaaagctgcttaaaattatttttaattatgattatcaaagaagcctactcattaaaaacggtggagagtatatacaaaggacaaagaaggaaagaaaatcatccatagttgcatgctttaaatgctagctctgtgaatagttgaatatactctggtattttttatgaagtttgtttagaaattttaagatgtaggcagcaatcagttcatatgcttactgactttttaatttcctaaaagacagtatattaaggtcattggatagtcttttttatgcatcctaaaaattaacttcttggtatttctttgtacatagatggaccataattttttaaagcagttccctctttctatttgtgtttgactcttttaaattaggttatgaccattcttgataaatcttcatatagctccatgattgttttcttaaagtcttagaaataaaacataaatttattaaaaaatttgataattcttgctattctgtccctcgcccccaaatattgaacctatttgaacttccattagcaacatttgaaaatgccaagttctttgagattttttaaaccataacttctaaaaactgtttgccattctgacagatgaaaactaaaatggaaatttggttaggcagagcagaagggagacggatattcaggaagaacaaataatacgatttgagatgaaattccacaacagtagattcaattttaatttttcacttggttactttatatcttaaacagaccatcaatgctaccaacccctccagactgatttataatcataaaccatgttagccctattatcagggtcttatacatatatgtatgtagattttatgtaataaacagtagtctgcttttctgcaaatcaagcaatttataaacattatttaaatatcaagctttcctgttttcataaactctctgtaggagaacagtgggtactcaagagtatgatcatgctagtcaggaagacagccaaaatgtaataacacctgtgttctgaacttcgcgtaatcttcaatctctaacagcaaactgaagctgaaaacagagggtagatatgataagtcttgatatttaaggaatatgccaagttcaggaagcatgtaaacgtgcaatgctgtaacagctactggtaatatggccaattgaatgtaataaaatctgactcataacaatcatttacctattggtgagttgcttttcctccaagagtaaaagtaatttcttcttgaatatagttactttttttcaagtgtgatgtcctctaagtccatgttccttaacgtggacctgtaacatcaacatagatatcacttgaaaatattagaagtatagattctcaggaactaccccagaaatacaaattagaatctgtattttcacaagatccccatctaaataacatggatattgaagttggagacacatggagcattagtgactctgttgagaatgggtccaaacatggtcaaactgcccacttctagagtatccgttgttatgtatgaatcatgtatagcagcaagcagcatcgagtccatctttggaaggcaaaagacaggaaaagactataatttgcatgaagatctcatcagaaagttcataagaaaaatggccaggctatgaatggtttgaaaataagaattgctctagtttggagagcttattatttaaaaagattttctaagtttcagataaaaatattatttgaaaacaaatcctaaatttgtttctctgtatcagtgataggagaaattatcattggatattttgctcaggttttccagaattcaaatctttctttgaagattttgccacttattcactgctgagtgaaagccacttgaaacttagtggcttaaaactataattcataattatttttcatgattctgcaggttgacagggttcagagctggggagttgttatttgaggcctcccaggcagttgcagtcacatggcagctgtgtctgtagtcacctgaagactctaccggttagatgtccaagatggctggcccacatggtggagagtagacatgggctgttgatagctaaacaggttgactagaccacctatatatgggctgcacatgtggctttattttctcaaagtgtaacagttgtgattggagggggactgtctcaagagcaaatattctcagagacccacatgaaagcgacaaagacctcctatgtctgagcctctgaagccccaaacgtcacttctgcaatgtttattggtctaagaagtcactagtgtagattcaaggaagcagggaaatacattccacctctcaacaggaggaacagcagcaagtttttataccaccttcaatctaccacaagatattttaaagttagaacaaccttccaggtacaccaatcagacgtagatttggtcttttcacatagtcccatatttcttggaggctttgttcatttctttttattcttttttctctaaacttcccttctcgcttcatttcattcatttcatcttccatcgctgataccctttcttccagttgatcgcatcggctcctgaggcttctgcattcttcatgtagttctcgagccttggctttcagctccatcagctcctttaagcacttctctgtattggttaaaaaaaaaaaaaagaacaacctttctaatttttaaaattatacaaccagatccacttcacaagtattcaacactgaaaagaatccaattaaatcagagctttggtcctacaaagcccacttacaaaaatatcaaaacctctttgatcctatgttaagtgaagttgcctctatctattgatatttgaggagaaatcagaagtgtcctgtacctcaaaagactttctcgtatgtgatggttattcttgatttctctcttccccaagatccattctccaccctctgctgatgaactctgtcatgagtgcagagtttgccatctgggctcctttgctctcaggcttgcaattgaatttggccagtgtcaggtacttgcttgtaatttctctttctctttctcccattgttaacaatgcatttccagcagtagcttcaacctctgctcctgactctcagtctttccttgtgagttccacatacttcttgactctgctaattcttattatttccctttctttcagctacaggagtgataatagatttcaggacttttgtttatttcaattttttttttctaaaaagaatacttttctggtcagctaatcgtcaaataataaaaataaaaatcaattatttggttattatgcattttttaacacagggagaagaataattttagaaactttgagccattaaaatcccacctatcatgagaagagatcagaaaaattactagagactttctcttcactgtgtgcctcacaagctcttaatattgctgtagcacatttgaagagaagcactttctttctgaaaatggagacaggatcttagaggacaaacactgctgtgattaagaaatttctgtatatagctctttaataagaattatattgctagaccacttaagctagaaggcaatgtttaatactccattttctagacaaccttgcaactagatgttcatgtcatgaaatggaatactcacttttagtgactcaatcagacccccttgcagctaggtattgattcaacctaattctcgcccatgagaaatcagcaaaaaaggcagcaagtggcttcgtggaagatagagactaaggatttgttacacagtccatgtgaggagatgcaaatacagaaaaattttcagatgcagctggttagagaagaggaaatgtgggtagcagacaacaccttgatgtagagttttttcccataaatatactcatgggacctcttgccccatgagtatattttatattcaacaatttgaatataaaaggaaaccatagactcattttataatagccaattataaaactgaaacctattatgtatgtatagcttgagagtcactgtggtcagcactcatgattgatgactttgaataacacttttgggtttatatagcaattttaccacctactttctctgatttattgaatggggttactaagaatctttaaacttctgtctcatctaccgtaaaatggggataatattaattcatcacagaattaaagattaaacaaaataattaatgagaagcacttagttcattacatggcacatattaactgcttacaaagtgttatttattaatattttaaattgttagttaatggttaaattaacctaaatgattactgatagtgaaatagttaaatatgccatatttctacaatgtaatactatatggtcattaaaaagaatgagaaagagaaatatatttatataacatgtatgtatatttgtctatataaagactgatcaatatattaatatgattaattaaatgataaaggaaattgtaatagaaagaatgtattagggtagtcctactcctttttttttttttttaaacagaatctcattctgtctcccaggctggagtgcagtggcgcgatctcggctcactgcaacctccgcttcctgggttcaagtgattcttgggattacaggcgtgtgccaccacacgcggatgagttttatatttttagtagaaacggggttttgtcatgttggtctcaagtgatccacctgcctcagcctcccaaagtgctggagttacaggggaagtcctgtgcccggcctagggcactactttggtttaaagaaaagataaatatgaatacacacatatacacaaatacacatttccttctaaaagggagacatgtgggcattaaggactgaggaattgaggaggaggaagataccagagatttcttagatgctgtttcaacttctttcacatacattccctttctttcttcagttatgaaatagatttgtattatatgacaagttctggccaaggatgtatgagaagaagctaagtgtgtctgtttcagactgaagcgattaagaaaccagagtgccttctttccacatctcccctccttttgctcattgattctactgaacgcagggagtctgcactggattctaaggcggtcaaggaaagagcacggataacaatgaaagctgcattcgctcgctaattagatccctaaattagcacttggagaaaggccaggcagaaaagctacatgtcctatgttagactatgatacagaaagaaatagcatttattatgttccgcattataatctaaagattgtttgttatagcagctagcagtaatgactagagaaataattatttttcatgtcattttatattgtctaaatttttatctaatgaaacaattaaactaaattttaaatgagatatagtacaccaaccaaaatttaatttataagtcaaaaaccaccaggagagattttattttctaagcagcagcttatttacatttttctttatgacaaggaattgaagattattctacacatttttaaatgttttggccatttcacctgtttattttaattaaaaatatttttaactttaaaaatatttaaaatacctgacagctaaaaagatcaagattttccaagctacctaatcatgtgccattagtcagatctgaatagctatggtagaatttctaggtagaaatattccttctgctagccctccctgtcactgtttcagattacttcaagcacttcttgacttcatccaaccagtgtgtaatactgtaagccatatttttttaaaaggctaattaattttttatagttcatctttggcactaatggtttgtgctagtaattacataattatattatcaactccctaacattcctaccataaaataaagcaatatataaatgacataccacagtaaatgaccatcacactaacaactattattatttctgttctttgctcagaagatgctttaagaattttttgatattgtaagaaaaaatgaaaccacagaattgtttgtgttatgatgacagaagaaaatagtgtatggagagccagcataacaataattaacactatttttaaaaatatattttatggctaaataacctcaacactgaacccattttaatatggaagttcaaaaggaaaaccatatatttcccacttatttttctttggcaaattctgtattcacagatggtacagatattttggctttctaaagtaaagcatctctatttatgattttgtcttggaagtctctttcgtggttagaccacattgtgtacacttccgatgatggacatatgatctgagcttagccaagaaaaggggcaggccacatgaaacatcatcaaggctgtaagaggctgctgccaagaagttggaaaagacaattttataggtcatgaagaaaactgggacccagatcaaccaacaaagcattgagtgactaaaaaaataagtatgtgatgctcatacagagctaatatgggcctcaaaagaaacttatttatatggaacagtgggataggaatgccatgtttaaactactttttaccaaaagaggaagaagaaggttagggaagaattaacctacctttggcaaaaaccacattttaaaaaatgaatttaaaatttcattaagtggtcatatatttgcataacattgccaaaaggtttattcttccccctcttttaaagatattccccaaggttgagcttcttgctgaaaacaaggcataaaagaccatatatttgcatttttttcattttcaattgttttgagtgtcaaatttataaatacttactaacaatttttgagccaagaaatgaaattcctcatcaaggtttaagaaaaaatgtaagcatattgcttataaaattcacattgactttggaatatggaaacattaaaaaattaggtaattatgacacaatttatggttaatccaaatccttctggaaaggacctgaaataaaaatcactggttagaatacagagatctccactacttgccatgttagagtaactgaatctgaacttgcccgcccagtggaaacaaccagaagattaaaaaatatatgtaaaagagtgcctttcagacattgaacaactatctgtgcatgactgtgatatataacagaaggtaaaacaaatgagatgagctctaaaatctaccagcttttcacctcaacccataccacagactgtgacacagcaaggtaggccacaagcagagctggaagatcccattgagatgagaaaaaagagatcaggtctggagagatggggacagtttgattttgtgggacaaaataccatagagcaaggaactgcacagagagagtgagttccagatatcagcataggggttcctttgagcctgtttctaagtactaagacccacatgaatagaatggtatttcctgatgcttggcaaataattatcaggatgatttaacttgaaccattacaaaagtgtaaacagggctggaagacgttaaagttttatctagaagaatgcagttatttcaatgaatacatcaaacatgttgtaggaagcatagaagagttaacttcagtagttaagactcaagtagccctatgataaaaaatagtacagacatgtcctaacaaatcttaaaaaccagcatggaagtgattgaactgatttgtaagttacttaactactgtccaaacaaagttcaacattttttaaaggtaaataacaaaatctggactctcaaaagcattgaatttaccaatcaaattaccatcaaatttatcatcaaattaccaatatcaatgtaatcaaacacagtgagacatataaagaatcaggaaattatgacacataaccagaagaaaaaaaaatctgcgaatagaaatagtaaaaataaagataatagtataagagagagggagttttaaagacctataaataagctcaaagatttaaagaaaaacataaatatcaagttgtgttttgatagttaggtttttatatcaaaacagaacttgatatttatgtttttctatcaaagaaagaagcaagatataaaaacaaatcaaataaaacttctggagaaaaacaataagcatacatatattttttgttaaaaataatgagatgggcttgccagatgattggacattgcaaaagaaaagataagagaatgttgagacatagccaaagaagacatttaatataaaacacagaatttaaaagactgccaaaaaatgaaaagagccagttacctatgagacaatatcaagcagtctaacatacctaaaattggagcctgtattagtttcctactgctgctgtaagagattgtaataaaagtaacagctaaaaaacattaaagagttctggaggtcagaaatcaggaatgagtcttttgggctaaaatcaaggaattggcagagctgcatgacttctgcacattctagaaaggagtcgacttcttggccttttccatctagaggtcacttgcatttctgggcttctgacctcttcttccatttttaaagtgtatcactccaacttctgctttggtcatgacatcaccttctcactctcatcctcctgtctccctcttatagcgatccttgtgattatgctggacttgcccagataatccaggataactgtcccatattaaaatccttaagctaaccacatctgaaaagttcactttaccatttaaagcaacatatttacaggttccagagattagggaatggggaggtgcattactcagtctattatggaatcacagaagaagagagagggaacaggcagaaaaaaagtttggaaaaaaaaaaaagtcccaagcaattttttttttaatgggacaggttcttgctctgtggcccaggctggagtacagtggcacaaccatagctcactgcagcctcaaactcctggagcttggatctaccctcctcagccacccaagtagctgggatgacaggcatgcacctacatgcccagctgttttttaaaaaaatttcctatagggctatgtgtctcactaaattgtccagtttgctctggaactcctgggctcaagtaatccttccaccttagcctcccaaagtgttgggattacaggtgtgagccaccatgcctggccatacaattttcttaatttgataaaaattgtaaactcaaaaacccaacaagtacaaaaaattaagaaggataaacaacatcaaggaatatcatcatcaaatttttgaaatccagtgataaagaggaaatcttacaagcagccagaggaaagggaacatgagtgaggagggaaggcatgttacttacagggaaacaaagattagaatttccacagactttttgccagaaacaatacaaaacaaaaatcaaaggaatatttgaagtattgaaaaaaaaaaatgctcttatactacataaaaatatccttacccccgaatgtatctttcaaaaactaaaataaaataaaaatattttcaacattagaatgctgaaaacttgtcatttgtttgtattctgatgaattttgtttattgactgttttccagaaaagatggcataagaaattcttcatgcagaagaaaaattatgtcacattgaaactcagactcactcaaagaaataaaaagagccaaaagtggtgaatatgtttttgagggttttttgttgttgttgttgttgtttacttttgttttagtgtcaacagaagataattgattaaataattaatttaagcaagggtcagcaaactgtctcctataggatatggcccccttcctccttttgtaaataaaatttaactggcacaccggcacacctatttatttacatgttatctatgactactttcacactacagtggcagaattcaacagttttgacagagacagaatggtctgcacagcctaaaatatttactatctggccttttagggaaaaaaatggcagaccactaatttaaagaacagtaatcaaaatccggtgtagagtttgccacatatgtaaaaataaaatgtatggaaagtcacacacaaagaacaggagaaaagatatgggagtatatcatttataaggttattgaatttcacttgaagggatgcgatattatttgaaggaacactgcaaataaaaatgcaaattaccaccctagacaatgactactcaaaaatgtagcaaagcaaataagccagtagtggagacaaaatgaagtatgaaacttcctcgttggctaaaataaagcagggtgaaaagaaaagagaaacaaatttgtggacaactgaaaggtaaaaccaagaagatcgatttaagcacatttacatcaataattatattgaatgcagatggcctaaccttccctttaaaaggcagagatttactccgcatgttctcactcataggttcgaattgaacaatgagaacacttggacacagggtggggaacatcacacactggggtctgtcatggggtgggaggagggggaagggatagcattaggagatatacttaatgtaaatgacgagttaatgggtgcagcacaccaacatggcacatgtatacatatgtaacgaacctgcaggttgcacatgtaccctagaacttaaagtataataaaaaataaataaaaataaaagagattttcagactgaataaaaaagaaaaacgcacttgctgtgtacaataaaaccgctcaaattaaaatgacataagtagattacaaagatgaaaaaaataccataaaaagagtaatcataagaaagctggagtggctatattaataaaagacaaaatatacttcagggcaggggatattatcagagataaaaggaacatttcataatgacaaaaggttcaattcatcaagaatatataatgtccctaagttacaaagctgcaaaatgcatgaatcaaaaattgacagaatcaaaaggaaaatgaaacaaatattagtgattatcagaaacaagtgtatagaaaatcaataaggatattgcatatatgaaccttttcaactactgtatccaaatatttaaagaacactccactcaaccacaagaaaacacacactctttttaagtataaatgggacatttacgaagatagagcatattctggaccataaagcaaatctcaaaaaaattgggaaaaaattgaaatcattcagaatatattcttctactatctggcataagggcccgttttaaacaaatctgatgaaatatgccaccattaaaatatgtctaggtaataaataccccattcatttggaaatatttagagcaaaaaaaagtgtattagcccttaaaattaaccttaaaaaatgatctccatttatttaattaataaattttgcaatattaggtggaaatatttaatccatttttaaccccagaattacataaagtattatttatttatttatttatttattttgttcaactggtaggcatgtctatgacaaattgcctcctgatacagcaaaacccatccagtcaccggccaacagcttgcagtttaaccagacatgatacagcctgaatgtatgattacaaagatagacaaaactagcatcaccaattgcagttcaattattttacaatataccgacattgctgcaaatgcagttggatcttgagaaccatattattctgtccagaactgtcatattgagaaatgaaacccatcaacaaattattcacatgtgttatctccctctgtgtgtgtgtgtgtgtgtgtgtgtgtgtataatttcatgaaaataaagatatttagaaaaaacaaagaaaaacttagttgataggagtctaggattaagtgagtctaagagagtttaattcaggaatacaacgttgagggcaagataataaaactaactccggtccttttaaaaagctgtatatacatacatacattcacacatacatatgcatatttgatcagaataaaaatatttaaggaaaatatgggaaatatttagagtaatatttgagacccaagagtcttggtagatgcaaactttagggaaagtaggatcccaggccaatacttaaacacaacaagttggcacttattttaaaacccctcaggttataattagtattaataaaccatcttattcacctcttacctctaggaatggtcacattcaaacctaatagaaatgaattttaccagccttaataatgaccctaatacctaggaactgctaacttagacttaagcaaaattattcttaaaaaatttttttgaatatttcctttcattctaccttttcttatttatgaaaattaagtttcccagcttcctatctaaatctggcacatcttcaccaatgtatgtcttttttttcttttcttttcttttttttttttttttgagacagcatttcactctatcacccagattggagtgcatgccacgatcatagctcactgtagcctcagcgtcccaggctcaagcaatcctcttccctcagccacctgagtagctggaactacaggcgtgcaccaccaagtccggctaattatttatttatcattattttttgtagagacaaggtctagctatgttgcccaggctggtctcaaactcctgggctcaagtgatcctgctgccttggcctcccaaattgttgagattacaggcttgagtcactgcacttggccggttttctcatctttagtaagaattgtgatccccaaagctgtttaggtatgttgttaaccagcattgtctagggatggtgaatgtgggctacctaggttaaaattccagctctgccacttactatctgtgtgatcctgaggaagttaatttatttctctgtgcctcaacttgcttattctttaaatgaggatgtcatagagatattataagggttaaatttcattatatttgtaaagtgctttaaacagtgtctggcatgggataagtcctatataatgctggttaaaaatttagggaaaagaaaaaactctttcaggtatattattgttttaaaaatttacagaatcatcttttctcttctgccttcttctctcccttggcaaaactatttaaaattgggacttaaaagataagaaaactccaattataatagatgtttattcttataggagtaacggcaaagtaatttttgaggattgtagaggagaaagttgaatatatttttatttcatcaatgaaaaacatgaagcgtttctcttctacctcaaccaggaaggcagctattgcaaatttaaccagaagactcagttgatgtgtactctaagattacataagtatcaattcatagcatttcctgtcctactttacagacctaaataaaagtcgtctacccacatgcttaaaatatcaccctattaggtgaggtttttatgttaggatagtgtatattcttgtttaatttttatgaaacattttacactttaaattaatggaaagatatatccagatattttcagttttctttaggtagtaaacttgctatagagtaatgtgaaatcaaatgtttgaggcaattttaagaaaagggatagaagaagaagaaaaaaaaatttaagccaaatgcccccatgggagtaaatcattttattggtagtcaagtcaggaaatgttaactggtggttatgtaacaaagagaagaatattttaagacatcgttttggaaatatctacactttaagaaaattgggggaatatttcctttttggtcttactgaaacattgactttttgaagtagaattgttaagaaaacacacactgttgaggttagttacagttagttgggatgaagtaattaaaatgcttgcatgagaacatcctctaccgcagttgtagttcatttcccccccacagacacagaacttttctgatctcattctgaaaaatatcatattttctcttcaaatgctaatggcctgccactcttttcccagttggttcattcagagacatcattttcctagtttgtactgtattatgttttgtttttaagaaaatgtaaggtactttagagtataactataaagaagaaaagtaaattggatttcacacaatatcaaaaatggtaaaaaaaacacattactttcatgtgtttactcattagcttctttacacattagtttcaggtgtttattgctttattcttagtgtaacattttatgtagcagtaaaatattggaaggcaaatgttcatcaaaagggaaatgaataaagatatgttaaaattatataatgcaatatacaatatttaaaataaataaaatacatgcatttatttatatacatatatgattatatatatttgcaataacctgaaatttcaaaagaatattgacattgaaatatgtagtcacaaaatgatacatagagtatgataacatctacgtaaatgttaaaatgcaaagtaagaccacgtgttatttatgaataaattatgaatctatcaagcaaaattataaaaacatggactggaaacatgtacaccaaactcaccataatggttgcctcagagaataagatgggggagggaaaagtagaaactttacctttaatgccctcattcctttatttaaaatacatgaaaagtgactaaatatttgttaaatctggatattgtacatatatatttatttcactatttcctgaggtattctatattttctaaatttttagcagtaaacataaaagtaatcatccctttaatgatttcaaaggagttttttgtttgtttttactgcataaatgtaagcacccagaattgcctctgattatattcaactttgatttgcagagcacagatctggtcagttcatggaccacaagtcatgggcgcagcagttcacactttttgggaaagatgtggtcattgttgtggtctgttatttcaccagaaataaatgaacattaaagtgttgttaagtggctgctatggaagcttgacttcaaaataattttcttactgctgataatgaaactgtctttgcaaaaattataactaaaacaattatgatagtgaaatatatttgaactatccatcttcctcttgcttctaacctccaagctctccatgttcattactggatatagaccaaactaactttgagaggaacttagtttatcatttaactttgaaataaagacaataacagccttttcccaaaacaaacccccttcctgcctggggactagaatgcctatgtgggactaacaaattagctatgagattaaaaattgtagtttaggagtcacacaactggaggccacaagattctgaaactccccaaattgctcctcgggataacatctctattgtaaaacctaagattagagcttgggatattttgcagactctgcattcaattgatcagttggcataactcagatccataaactgactcatctggtcttatggcccccaccaggaactgactcagcacaagaggacagcttcaactccctatgatttcatcttcaacctgaccaatcaacacttcacactttctgaccccctacccgtcaaattatcctcaaaaactttgatccccgagttttcagaaacacctatttgagtaataatacaactccagtctcctgtgcagctgtttctgcatgaattaaactctttattgcaattcccctgacctgatcaatctgctctatctaggcagcaggcaaggagaacccattgggtggttacaataaggtgcaacacactttcaactttcaataaggatagtatttacgcagattagcaccagacttgaaattatactaacctttgtccttatcaagtgaaaatactctcttagatttggatatatttttgttatcaccccatctggcttgaaccctcaagtcagacatagtatctagtatttaaggtatttaacttccattcagaactgacatttcattggttacggcaagtcatgtgcccccaagacaatgaagtgaggaagtacataccacccacagagtgggaaataagtaagaactgtgaacaaatactatgatgaacataccaatattcattacattggaaggcatccgtgtctgttttggcatcaagaatggtagggtacaaaggtaggacaaattttacaatacaactttattttctgcactgtacaacggagataataactataccatttgactttgagcaacgactttattctttgaaaaagtgtgttttaaagaggttcagtaactttctgaaactactgcaactctcaaatggaaactgttggatttggacccaagattgttaccactaataagctatgttatcaacatataataggcctctaagctcgtatctataaaatgttgtagttggtgtcttggatctcttaaatgctccacaatccatttggtctgtgtgcctacgagtattgcctcaaagctatttggagatgtgaagacttgctttacagtctttcaaagactgccacagagccccaaggtcagctgagactaagactcacttgcctgacacatttaccaccaagaagcacttagcaaagtttgaaaatatattttgataaaaaatacctatagttaggtcagaagtttacccctgccaatgttagctgaatagcattacagtatttaaagtagtacatacaagctacacaaatgatagtattcaggagaaaagtgcttatgtatgaaaagaaaatgaagataaaaatattaatgggacatgtcactgctcttatatagtacctttgacacataactcttaggagttcattgaatacaattctttttaagaaaaaaaatcaagaaaatacatcttttaaaagattttttaaaaatcacagttttcaaagacatcagcatgattatcttctaggaatctcaagttcaagtttcatatatctggtcatcttgttgcaaaaaattaatgacagtaggtttatttaaataaattaaagataaaattgaaaaataaacaaaataaagtaagctccaaaattctactgccaaaatgaacttcacacaatggtaactttttggtcatcacattcaattgccctcttgtcctctctatattactctaatttttggaggatataccccttactatgtattttatgcaaagaaaatatgtgctagggagttttctggtatccactttctgagaggaacaagaaagcaacaatgaatattaaatgtctttcatgagctgacattatgcttgaggcactacaccatacatacatctctctttccataatgcttattaaaaattgtaggtaaaaatcccaaaataatcagagagtttaaaaacctgatctcatagcgggatgaaaaaataaggatttaaactcatctggttcaactccagagataatcttctttggtcaatgaaaacaggtccacaaacatgaaaaaggccctaaaccattgtttataagctgcctctgccctccaaattatcactgcagaactctcactataagaataatgacaaacaaagtaagacatacccacaagtattaacttgagtcttcaaatgctctataaaacctagggcctttgggctactgggaaggctgtttatttagagaaaggcagaatagttaccaaagatcatttgaggtttccaattttcatgggcatcctggtgatcaatggaaggaattagttttgctttcttagtcttaggaataaggtgggaaaagtaagttcatttcatacagttacccacacaaatgtagctctcatgttgcattgttcctgtcgtaaaaaaatataatgaatttcaatggaaaagtcatttaacaatcgtattttttaaaatcaatgttgtatatatttgataaactataggaagtataggctgtgatctataccttactcattcagttacccacacaaatgtagctctcatgctgcattgctactgttgtaaaaaattgtaatggatttcaatggaaaagtcctttaacaatcatatttttaaaaatcagtgttgtgtagatttaataaactataagaagggttggctgtcatctataccttacaggaggctccaaaccaaatctaaatagtcacagatagggaagggccccatcctggggttgctttactccatcattcactataacatcagatttaggtgcaaatgaaggtaggatgcaactatgataaagttgcttgtaattcaacatcctgtatcagggatctcattccttcttttgctttagaagcaatgatttcataatgttttaagaaaaacagcaatgacaaatgaagaagctgcctgggaaagcgcatacaatgaagcatttagaggaaatgatcagaatattccacctgacgtgatataaggggcaaatacaacactttcattttatacatatggacttcgtggaccaaaaagactaagtgattcaggcagggttatgtagcaggtcttacagacccatgactacagcccagttctgcaagcttaagaaaacaggctaaaaaagaggacatttgcttttgaatctgtgccactctaatggttctttcaagctgccttcatgtgttaactaaactgctgaggttagaaggaatccagctttccatgaatgacacatctgactattatgatttgaatatgtctccttcaaaattcaggtgttggtaaatgtaacagtatcaacaggctgagtcttttaaaacttaactaaaccatgaagtctcctcccttgtggatgggattaggtgcctttatgaaaggtcttcattgaaagacttagttctcttttgctattctttttttaaaaaaaaaataagttgtaaacatttaattggtacaagagcaatcttgttatgtggatacattgcatagtggtgaagtttgggcttttagtgcaattatcacccaaacggcataccttgtaccctatcagtaatttctcatccctcacccttcacctaatctcccacccttctgactctccagtgtctattattccacactctacatccatgtgtccacattatttagctcccacctataagtgaaaacatgtagtatttgactttctatttctgagttgtttcacttaaggtaacagcctccaattccatccatgttgctgcaaaagacatgatttcattcttttttattactgactagtatgccgttgtatatgtatgtgtgtatatatatatatatatatatatatatgttgtgtatgtatgtgtgtatatatgtatatatatacacacacaccacattttctttatccaatcatccattgatggacactaaggttgattccgtatctttgcagttgtggttagtactgcaataaacttatgagtgcagatatcttttttactcaacaatttcttttactccgggtaaatatccagtagtgggattgctggattgaatactaactccatttttagttcttggagaaatctccatactgttttccatagaggttgtactaatttacattcccaccaatagcaaatgtattcccttttctctgcatccttgccaacatctgttattttttgaatttttaataatagccattctgactggtgtaagatgatatctcatggtggttttaatttgcatttctcttatgagtagtgatgttgagcattttttcagatgcctgttggccatttgcatgtcttcttttaaaaactgtctatcatgtcctttgcccactttttaatggggttatttttgttgtagttgttgagttgtttgagtttcttgtaaattttagatatcagtacctgtcagacgcatactttgcaaatatttccttctattctgcaggttgtatgttcactctgttaagtatttctcttgctgagcagaagctttttcagttccatttgtctatttttgtttttgttccttgtgtttttgaggtcttagtcttgcttgcctagaccaatatccaaaagagtttttgctggttttatctagtatttttatggttttagaacttacatttaagtctttaatccattgtgtgttaattttagtatatggtgagagatatgggtccagtttcattcttctgcatatggcaattcaatttttccagcgccatttattgacaaggatgccctttcctcagtgtatgtttttgtcatcttggtaaaagatcagttgactgtagatatgtggctttatttctgtggtttctattctgttctgccgatctatgtgtctatttttacaccagtaccctgttgttttggttactatagccttgtagtagtataatttgaagccaggtaatgtgatgcctccagctatgttctttttgcttaggatttctttgattatttgggctctcttttggtttcatataaattttagaattgattttgtctaattcagtgaaaaaatgatactggcattttgacagggattgcaatgaatctatagatttggtcctttgcccttctgccttctgccatgtgaagaggcagcaagaaagccctcaccagatgctgaatccttaatcttggactttgcagccactggaactgtgagaaataattttttgttctttattacctagtcgatggtactctgttatagcagcacagaagaaactaaggcaaaaattgtgtcagaagtgaggtgctgctataataaataatgaaaatgctggaagtggctttgaaactgggtaatagatagagactagaacagtctctgagtgaacactggagaaaatatcttttgacaagaataaagcattaaaagtgattctggtgagggctcagaagaagaaagcctaaatcttcttacttaagaaaggtcctgacaatggaaactatgctgatgaagtctcagatgaaaatgaggaacaaggtattgaaaactggaggaaaggtcatctttgttacaaagtggctaaactcttggctgagttatgtccagttccaggacttaaggaaggcggaacttaagagcaataagctaggatgtttgctggaagaaatctctaagcaccaaacaattcatggtgcctcatggcttctcttaactgcttatagtaaacgaggagaagagagaaatagtttaaagatggaatctataattaaaagggaaaccatacgtaaagatttgggaaattctcagcctagccatatgtgaagagtgaaaaagagtgtttaggaaagaaaacaaagagtgtggacaagtgaccatttgagattagaatggatagaagaaagcaaagtgttattcatcaagacaatgggagaatggccccaagggcattttagaggtcttcaggttgtcctttccatcacaggcccacagtgttagggacttaagggcggaatgatttaaacacatggatccagggaacccagggacctcagggcttactgcaattgctgccaaggagctcagctttccacattctagcaccatgccttttgggcactccaaatgtggctcaagcaagcccaggtgcagctcaggctgccactctggagggtacaagtggtgagccttggtagcatccacatggtgctaattctgcaggagcacagagagcaagagtgttggaggtatgactttttccacttagatttcaagggatgatgaagaatcccaactaaggcaatgccaaatgaagctatgaatgtggagctgcccccaaaccccagcactgtagagccacaagcatgtagtgccagcctgggaaagccacaggcatgcgaattcgatgcatgaaagctgaagtaagaaacgttttcagcaaagccatcaggcagggctacccaagtttttgggggctgaaccaccaccctagtgtgcttgaaaagtgggacataagatcaatgatgagaatccttaagccttaagatttaatgttgcttgccctgttagattttggatttacttagaacctgttacttcgttcctctttcctagttctgcctttgggaatgtgaatgcctatcccaccagtgtcttttgaaagcacataatttgtttgacttcacaggctttcctctgaaggaaaatttgcctcagcatgaattgtgccctgagtctcacctatatttgatttagatgagactttgtgcttagaatttaatgttggaatgagttaagacccattggggtggaatgaaagtattttgtatgggagaggaacataaatcttgaggagcaggagaagaatgctatagtttgaaagtgttctctccaaaatccatgtgttgtcaatgtgatagtattggcaggcagggcctaatgccctgatgacacttcctccgtgaatgggattaggttcccttacaaaggggcttcagagagggagttggtcttctcttgccctttttccttctaccatgtgagactgcaggaagaaagccctcaccagatgctggcacactgatcttggaaaccccagcctccagaattgtgagaaataaatttctgtttcattataaattacctagtctgtagcattttggtatcagcacaaaatgaactaagacagcaatgaatgtattgctttatttgcataaggaaacaatgttaaaaaataacaacaataaggaaggaggccaccttggaaaaagcatgaaatcaggtattaagactgaatgattcagaatgtttaagttaaagtgatctgaggggtaagtccaaatgatgtggtttggatccatgtccccacccaaatctcatgtcaaattttaatccccaatgttggaagtgggacctggttagaggtgattgaatcgtggggtagatccttcatgaatggtttagcactatcctcttggtgctgttgtcatgacagtgagtgagttcttgcaagatctggttgtttaaacgtgtgtagcacctcctccctctctcttatgctccttctctgaccatgagaagtgctgcttccccctcactttccgccatgattgtaagtttcctgtgggcttccaagaagccaaatagataccagcatcatgctttctgtacagcatgtggagttgtgaggccattaaacatctttctttataagttactcagtctcagatatttctttatagcaatgcaagaatgacccaatacactaagctttcactttatacatatggacttcatggatcaaaaataaaataagtaattcaaacatggttacctggcaggtcttacagatctatgactacagcccactacagcaaatgtaatactacaggatggaaaaggggacatttactcttgaatctgtgttactataacaggtcattcaagctactttcatagtactttccatatattagctaatctgttgaggttagaaggaatcaaactttccatggatatcttatctgcctcaatcacaatttcatataatatagatatatagataaatttttataagatctaagttttttttaaatagataccaatgagatgagtaagtcctatagctgaagcagagcagttataaacctgtgctatgtattaacttctaatatatttcccattctcttgccttcaaaaaaaatcaaaggttaagctggaagcaccagttagagaacagtggctcaaataaccttcttccatatcaaagagtgactcattaaaacttttgtcaatttgctccttcaagggaattgactgagcgcacaggagttcttataaaatcatactcaagtgtaagtgtgatggtagacttctggaaggattacagtcaacttgatactacaagggaatctccaatcccacctcattaggatgacttttctgcagactggtatgtatataatgaaccaactaaaatcagttacatattttctgtgttcagttgagtatgtaaagaaatataacttgaagcctgtatcaacaagagccagtgaggcaaaaaagtagtttaacagaaaaaacaaaacaaaacaaaacaaaaaaacaaatattggcaactagcttaaaaagagagttgaaaggtaagtgaggggacaggagggcaattcagagatgaacaataacagacaacatctactgtcagaggaatttgaaccagagtgaatccatcttgaatcagggctaggtaaaataaggttcagacctactgggctgcattcccaggaggttaggaattcttagtcataggatgagataggagcataagataaaggtcacaaagaccttgcagataaaacagcatgcagtaaagaagccagccaaaacccacgaaaaccaagatgctgatgaaagtgacttctgttcttcctcactgctcattatatgttaattataatacattagcatgctaaaacacactcccaccagtgccatgacagtttacaaatgccatggcaatgtcaggaagttaccctatatggtctaagtttacaaatgccatggcaatgtcaggaagttaccctatatggtctaaaaagaggaggaaacctcagttctgggaattgcccatcccgttcccaaaatactcatgaataatccacacttgtttagcatataataaagaaataactataagtatactcagttgagcagcccataacgctgcgcctgctctgcatatggagcagacattcattattcctttacttttttaatcaatttgatttcacttcactctgtggactcatcccaaattcttccctgcgcaaggttcaaaaaccctctcttggggtctggatcaggacccctttctggtaacactaggatgaagtagtcagaggaaagaggtttttcctagagaccaggagctggcctctccaggtagttgctaaaaccacttcaaggacaacctgccaggagctggaaccataaaagagacagtcacacaagacattgcctgacgcacagagagagagataaatatcttggtttgtctcctactctcaccctcaagtctacccaataattactggctgaaactaccctcaagtcaatgaaaaatgtactttttatgagtttttctcttgcattccagttatctattgctatgtagcaaactacctaaatacatagtgctgtaaaaccacaaccattgcattatgcttacagagaggtgtggtaactatggcttgtctgcttcatggtgtatggggcctcagctaggctaactgtaaaggctgtggctggaggatagtctttcaacataacatcttcatgcacagatctgtgcctgcattgtgataaccaaaggaccaacacagcaaggactatcaactgaaatacctgcaggtggctgctgcagcattgtggtgtcaggttggccgaattttaaacacagtatttcagggcaccaagagtgaatctgaccagcaaacaaggctaagtctacatggtcttttatgatacactgttggaagcagattgtggttttccagctctgtgtttttggtaataagttatcacttttgctgtattctgttaatcaaagcaatcacaagcccacctagattcaatgcaagggggaatgtagattgcctccaaatgaggatataaaagaacacatagacatattttaaaacaaattattctagtcacaaagaaaaataaaattcaaaaactagaacaaaattcaaataagaatgcaaggactaagaaaaaaatactagaaaagagtacaacaatgtacatcacaatggaccttgaattatggccaaaaagtagcacaggcaatgaatgtttcatgagatctgcagagaaaaatcactgaaaaaagttaagcatggcttccaaaaagcattatccagtttccctaaaaataaagtagaaaattatagggaaaccctctatttcccccagactttaaaagagcaggtcatatagaagttaggtacaaacctgggtgaattctgaacttttgcaggttagtcgttctgtttacctaacatacatgcaattttatcttcagaagtagcaatctgcactaatagtttgattttatccttaatatgaaactacatcttttttctccaggtgtgcagaacacaaattgttatgcaaacatgaagctctcttgctttctcctggcctatactctgtactcttgatattggttctttcttgttcttccctcctccttttccttctctccttcaatcaacacaagtcctgccttgcagcccttttagttttttggcttactttgtgttcttagcctcaaattccagtggaacctcttagcctaaagcagctattacagtttttgtaggatgtggtgagtccagcagtcttcagttaccacttgtagacctccagacctctctgtggtgaggggagggggacccaggccattctctgcctgggatagatgactaaagaaaagcacatgacccaaattagcaaaggaagaagcagaacacatggaaagaattttcttcaaacaaataaaagtttttttggactcttcttttatgattcaactcttctgttgttcagctagaagttggagtcatggaaaagggagaaatggctggtgagtggatgagaaaaacttagaaactgaaattgatcacctttgcatgaagaagataaaaaattaattcatattcaagaggtatattcacataggtttatcatggaattatatacaattaaataacccccatgccctctgttccatttgggtttctattttggttagcgcgaaaacactcatgaccacaagactcttattttatgtgcaaacagaaggctctagtgagtgttcatttgtcctctgattaacaactacacagaaatagagtaataagccttgctatgaagcagctttccactccattatatattgaaggaaaatggcaaatctgaaagcctgctactaaccaccacagtgaattaggagaggatgaaggctggcattaagcgattcctttaaattcagtaatatttgacaggtctcagctgttgggaatagctgtgaactaaattattgaaaaaaaagaaaagaaatgatttccaagtgatcatgtgacttaaagaaactagacaaagttcagcccacattcagctgtcagaaacacaccctccacacagggaataaagtgtgtaaattctaactctttacatctgaagactcctgcttctcatctaaaagtatttcaacccagttcctatgccttaatgctcagggtgggtgtcacggtgggtggctctctggggtgctttcttcatgagaccagttagaataaagaggaaacagggccactgttttaactcattggctttggctttgaatatatgctttccactttttaattttcattttatattctcttcgcagcaataaccacatttatttaaatgttcattccatttgagtaagagtttctttgaataagagccatctgttttgtttaatctgaggatgggtattttgtacctattcctctctagatagagtattaggaagcccatgtgttgagtcagaccgtgaactaccaattcctctgtgtaataataagcaaggatagcaaaacttagctcagcgaatcaaatgtgcaacacccactatcacattgagtagcagaggagagataccacaaaactctaacagagtatcataaatgtcatgaagaaaatgatctccagaggcattttcataatacataaattcagacaagtttattagagccaaagacatttacttgatttgacgttgctgcactggtccctaaggacaaattagactcataaattctgagtgtcctgaaaacacatggtactctcctgccacaagcacactttattttgcagagaatcgtttgtggactcatagcagcaccatcaccggattggaaatgctttgcttaactattcagcaaggtttccagaagattctgtgacctgggtgtccattaaagttagagaagctttggcataagaaatgccctccaaatttgctgtctggaggtgaaatataaataagtcccccacctgctgtttaaagaaagggtctgctcacctgttagaaggcaagctgtagactagaacagacagtgttacataaaccaaggccccctgttaatagtcactttggaaattcccaaactgtgagttggattagtccagaagctgtggttaccaggcaagttgaggtcccaaaccacctcagaaagattccaaaaacacactctgtgtcactgtttcaaaacaaagctagtaatattttaatcccctcaccacaagggcatgtctaatatagcttgtcatgaggccagtgacttagagaaaggaatctggatttccccagttctatcagctctttgatattgaaaaaataaactaaaatctgtatcagaactggaagcaaaggcaagcagttcaagcagatcacaggcctgcctccagcactaatgatagttcaagatcattctacgggtttttaatgttaggccttctagcttgttcacttgatgatatcaccgcatgctttgaaaatccttttaaaaattaccattattctttcatggaaaaaaacaaacagagccgaaaatgatccttttccaagggatttgaggacttttaaaccctgacttcagattcataagtaccatgcttttccttgtgcctttggatcagaaatattaaaattcttctccagagacatttttcattttgtctgtagcagttttatattaagaaattaatgtttgtggcaaagactgagactgtgataatgccacaggtaaatcaagaaggccctatcagtggtgatgaagaaggttgacactaatttgttttttttctgataagcagcaccagaaatcaggaagaatagcattcatgacctcgcctgagtgtttgccctgtgtgtaactggtcctcagggttgactcacaaatggagcaatgacttggacttgactctctgggtcttcactgtaccttactcttactctggcctgattattctggtattctggcctcagtgtgcttgctcctcacactttggtgacagtggttctttgaccacagtcagggagagctccctctttcatcttcaggtccccttttatggaaattagttttggcttccattcttaaaggatttaccataatttttccttttagtattaagaaatgttttaacaaccagtggtttgagtgtctgaatccactctccaaaacaaccaactcattgccttctgatttagtttctagttattgaatttggcctgctgtacttccgttccacctaaagtgaccaactcattatgcttgccactgaatgtcctgcgtcccgagaagcccctcagtcccaggcaaaccaggactttaggtcaccctgaatactcctcctcttttatcactgtctactccaacccatatctctaatctccactaacaaatacacacactctttctatgcaccacggtgtccataatgtgttggctctctctttcttttccttcctctctccctctttctccctacactttctttctcttttcattttccattttatttgttaaccttttctctatccccaggaaacagagtgtgaagggggtaaagagagagaaaagtatgaaaacatttatatgcaagctacattaatattgccaagaataaggtaatgtcgggagtataatcgaagttataaaaaaaggactaacgtgtctcaccaatcatagtggtatattttgcagcagataagatataaaaaattttactggggataaggctgagggtggaggaggggatatgtaagtgtgatttttttttaatatttgatctaggagaatttatacatgttctcatttcatctccagataacaaaaatgaggtacgtgtttataaaaatttaaagatgagaactttgagctgcaagaaaattaaatagtttgctgacggccatcaagctaaaaaatggaagaactggaattttggaactagatctcttaaagagttactagttttattcagaagatagaggaaagaagacatgaacaattatgcatatggaaagtatttggtaaatttccaggtaggtgaatcaattccgttaatctagatgtcacaagaggaactgatttgcagatcagctggcagaatgaaggactaggtgtcgtgagagccatatctgcctgagtagattggggtgcagtggcatggaaatgacatggtcggaagcgtagacacttcctagaaaaaggactcgtgagagaagaaacgtatccgtgattgtcaatttcaggaccatcactgatgtgagttgacagcatccttccacacagggaagaggaaaaagaggtgggatgcagcacctttaaaaaaattgttagattccttgaataagattaaaaaaagaagaagccattgatgtgaatctgttaaagtctggcaagttaaatatatctctggagaagtattaaacatgacattgcatgtttaactttaataagaaaaatatttgtaaaaatgtaacaaattaagctgtgactattgggattagtaaaaagaccaaatattatggtttgaatgtgtcccctataaaatgtaggtgttgaaacttaatggtcaacgtgatgatattaaacggtggcccctttaagaggtgattcagtcatgaggactccttctctcatgaatgggattatgacccttacaaaagaggcttcacgcagtgttctgttcgcttaccctgcagctattctgccatgtgaggacagagccttcctgctattgggaggatgcagcaacaaggtgtcatcttggaagcagggatcagccctcaccagaaaaccaaatctgccaccaccttgaacttagacttcccagccttgagaactgtgagaatataaatttctcttctttataaattacccagcctacagtattttgttgtagtagtatgatggactaaaacaccaaatagttggaaaaatgtaatttgaaatgtataaatatattaaagtgtattccaaaacccaaatgaaatataccaaatttatatagcagaatatctccttggcttttcttcaaggaatctattttaagagacttatatctatcctaatcataaatatatatctgctgaacttctttgttctctggtctaaacaaaggtatggatccaggggtgagaggcatggcagaagtataaattgtacaatctagttaggaaatcagaacatacataggaaaccaatagagaacagagtaatacatacggaacctaaatatactacttaggaagttggactctcaagagagaaaagaaaagattgatacagtattctaaaaaatcttggcacttgaagaaagtctgattttcttaaatattgtaattttcttaaatattgtaagcaagtcctcaacaatattgtatgaactgttatagaaaaataataataaaatttgagttctaattacctgccaagagtcgtgctaagggttttatatgcattatttaacttactttttccaacggttctagaaaagtttgtcattacatccctatctttaaaggagacaaaatttaggaagtgataagttaagagttgagagataggggctaacttgtccaagactgacccctgcagcctggcttctcagaaagggaattttccttctgcaatgttctgtgggaaacccactctgagcaatctttaagccaatcaatactgagcaacattgaagcttgaaccccaactcttcctcctcccaccctcaatatgccagaggagaggtttatgcttcaagaaccaagaacaccagtgttgttgctagcttactaacaagaacacctctctgctagttcaccacgtaatccacctgcaatttcaacttctggaatcatgaaagcaggacaggaacttgtgcctccctccactgccagtcatcactactaagctggtagaagaggggcgcagtttctgccacatcattttgctatcatatcctggtccctgataacaccaggagaaggccagtgcttccctaaccatgcagcttcagagctccatggcccaagggtcagaatcactcttgcaaagtcagaaatcagggttttccaaatcttaggttactgcctcaacacaatgaggctaccaggggatatgaatacctactactgatcctagggcggtgagtttgtccagtgagtgctgctcctgcagacctgtatgtgagcacttctgagtttttgctcttgtttgtgctgttgtcacttacccaaagtctcaccttcagtaatgtcacatccaaggggcaaatattccaaattgatggtgattaaatgaattagtgaatataatccagattgttgttatcaatgagttgataataaatattgtcgtcgagctgacatcatttacattatttacataaacgtctaaaggcagtctaagatattttcaacatgtctttacaaacagaatctgtgatttaaatgtgaaaaactattttaaaatgccatgatgtgtggaactgagggctaagattatgtatacttttaaaacatgatcagaccaaataaaggttcaatgtaatgccacagttctacatggggaaccttctcctgaatttcagtagtgctgaacataaggacatcatgaccagataaatctgccttcataaagcttaacatctagtgacagttcttagatgataaacaaatggttccaatctagggtgctatgtggtaagaaaggagtggttctgcatgccttgaggacagagaaacagtttaatctagacttgtggggtcaggaagcgcaggtgaaaaaatcaggggctcctcacctagtgccatgcagttggattaagaaaaatattacatctttattttcaataactaactaaaacttaacatttccttctgtaatgactgtaggcaacaaaccacagtagcagcagaatatgtgatcacagaatagaaattatagatattttcacaccacatcacaactataggaaatatatctaaacatcatttatgcttattatcacgttgaaattagagaggttattagttccaccactacatgttgtcacttaaaacattaataaagatgttcatatatcaaattttatttcctctagtattttgataggtttatttcaataggacctgttccctttgcttagtttctttattttatgcatttagaacactacattgggaaggattcatcatcatgaccagatgtcacatgggtctatgatgccaaaaaaggaagatccctggagaacagtaggtagatgcttggaagaccgggtaacccatgggattgcaagtggaggtggggagagagaggttgcctgtttataagaaacaaataagtggtgttccaggcagagggaacagagtgtgcaacaccagagcagcgagcactgggagagacaaatgtcccgagtctctggatcctgccagagaggaagagcttggagggaagcaatgtggttaagagacgcaagacaaattataaatcatgctgctataaagacacatgcacacgtatgtttattgcggcactattcacaatagcaaagacttggaaccaacccaaatgtccaacaacgatagactggattaagaaaatgtggcacatatacaccatggaatactatgcagtcataaaaaatgatgagttcgtgtcctttgtagggacatggatgaaattggaaaccatcattctcagcaaactatcacaaggacaaaaaaaccaaacaccacatgttctcacttagatgggaattgagcaatgagaacacatggacacaggaaggggaacatcacactccggggactgttgtggggtggggggaggggggagggatagcattaggagatatacctaatgctaaatgatgagttaatgggtgcagcacaccagcatggcacatgtatacatatgtaacaaacctgcacattgtacacatgtaccctaaaacttaaagtacaataataataaaatttaaaaaaaagaaaaaaaattaaaaaaaaaaaagagacgcaagacaagcaaggaacaggtctgtaagctctgaagaggcatgcggagaaatgtaaatttcatcttaagacactgggtggtgaataaaacttttgaagcaaaattttcaaaattatttattcctcaatttaaaaaaaattgttctttccaaataactttttttctcaatcttatttcctcaatatttgaaatgatcctgtggtgtagagtcacacattttcttatactacatacagatggacagagataacagagcattttaagtgattgcttttacaattggtttgatctttcttatgtacaaaagtcaacttaaacgtgatgtgaatgtcatatcttctttttctctaattttacagctgctcctatttggccattctgtgttccatctccctctcttctccccccaacagagggagagctcttgtgttccatcttgacatgaggacatgtgtgtgttggcaggagagggtcctgtgatgatgtctggctatccaggagctactatggcaataaggtcttgtatctgccttttcattgcttgcctggctagcattactgtgatagttaactgctcctgactgtgatccatgctttctaagcctagtcaaagaatgatgttccctcctgctgacttagatctttcttggcttttgctggcaaccttcccacagatgcctgaccatgattcttgcccaattttagccaggcagtaaaccctgaaactcttggctacagaggtttctattcctacaccatgatgttcctcctctctagttgtcatcggcaatggcttccactccataatgagacaagccggaaattgcagctgctactccatcatgcctgttctctctctctctttctctctctctcctctctctctctctctctctctctctcacacacacacacacacacacacacacacacacacacagagcaggtcacattgctaataatatatatcaccctgttactgggatatcctgagaggcagtgtattcccaaaatcccaaacaggaaaaacagtaactgcacttgttttctttcccttaactgattgacaaagacaccctacaagatttgagagaggaatgtaaaggcactgcatgaatctgacctgctgctctccctcctcattgattcccttctctttccgacaatccacacaggcagaagttctgggatgttcccatcctattcctttctggctggcatttcccctgtcataccctccttcccactggcatactaaagttcaaggcttaacctaactagtgaaacaacctatgatttaggtaaaccagacatgacctcagtacagaattgtcagacaccttaggaataaggcaattggaggatgatagctcattagttaatattctaaaaataatactctcagatcatcatttttccttgaaaatcatttctttcagtatgctgcgcagaatgaccttagactcccaatgagcctagtctcccaacgagtgagagcagagagcctcaaacatctttgtgtcttgtcctggatggagattcctgctcaagccactggctcaatggtccaatctttgaggagatagaatttaagcaggcagatctgtacacttttacatgacacccatcacctctcctctcgtgtgtctctttttccccctcctctttttctctatttcccttttctgtttctccaaacccctcagttaaccctttccctgccccctagtccttgtccacacagaaaatctggttctagagaacagtactcaaacagcctccaactaaaatgcattacgtgtggtaatgcaaaaaattattagaacagtttttttctatttaaaatatgactcctgttcactgctttggtttccctgtctttgtgcttcaggctaaatattactcagatttctgcgaggccaggtgctttctcaccaattatctgaaaggcccagagaatggtacttacatcaaagccagtcctaatgacaaaggacacctggccacggcaaacacaagcatctctcagctcctcgctccatttggcaaaaagctatttccatctcagtcacaacataacaaaggactaattgatgggagcattttttccatctttcaaaaaataaattgagccaaccccacgagctcatctagaggaattaattagggaataggaaatctccaaagccatccttaaattgacattgaacaaagcccagggaacagatggcttttcatctgaattctttaaaacctttagcactctactaattcccctataggaatgaaaaaaaattgctaaatgaatttgagcaaactatttcaccaggtgttcagttcccctaagattccttttgcactaagaaaaaaagaaaatacaacaggtatcctctctactgatattactataatttcatttgtacatgtgagttcttcccccagggctcattctaaacttcccctgcatttctgactaccaagctgggggaatgattctcttaattggtgcagctgatcatgcacaactgctcagagcacaaggacagtgtcaacacacacaaagtcgagaatgaggccattgttcaagcaaaatagaaaaatagaaaacaatttttgtcattttgtttcagatatctggagatttctggggcaagagatggagaggataaactgtattatcccaatagttgagtagattttttttccccgtacaaatttgacatgtagaaacattgtgaataagagagacattgcctctcatttgcatagttaataagaagctgtcctattaaagcctctagaaggatgaactgctggaatttatactttatctattcaaaggatgtctacatacaatcctccaagataatttggtagaaaattttaaaacacttttttctttttaaaatttgacagataaaattgtatatacatactatgtacaacaggatgttttaaaatatatggacattgtaggatagctaaattaagctaattaatatgcacattaccttacatagttgttatttttgtaataagcatatttaaaatctactctcttagcatttttcaagaatataatacattgtgatgaactatacctccatgttgtagaatagagctcttaaaaatattcttcttatttaactgaagttttgtaactttttaccaacaggtccccattaccttcctctagcgccccagcccctagaaaccatcactgcactctctgcttctatgagatcaacgtttttagactccacatgggagcgagatcatgtggtatttgtcacatgcctggcctattttacataatgtcctctaggttcacccatgttgtcacgaatggcaggatttccttctcttttataggtgaattgtatgccattgcgtatatatgctacgttttctttatccagtcatctgttgatagacacttgggctgattccacattttggctattgtgaatagtgctgcaattaacaggataaataaaataatataataaataaataaaataatataataaataaaataaggaaattggtatgtccaagagtgcggatgtctcttggacatacaaatttcctttcctttggatgtgtatcaaatagtgaggtggctggcccatatgataattttatttttaagctctttgggaatctccatacagttttctataatggctgtactaacttacattcccaccaacagtgtgcaagtgtttccttttctcacctcttgccaacacttgttatcttttgttgttttcttttgaagacacggtcttgctctgtggcccaggctagagtgcagtggttcaatcatggctcaagcagtactccagcctcaacctccagagccgccaggactacagtaagacgtggtctcaccatgttgttcaggctgctggtctctaacaactgggctcaagtgatcctcccatctcagcctcccaaagtgctaagattatagttgtgagccactatgcccggcctttgtctttttgataatagccattctgacaggtgtgagatgatattttgttgttattttaattggcatttccctgataattaatgatattgagcattgttcatatactttaaaacagtttttcatttatgatacattttgttttacattttagactgaataattttatttgggattctgatatttcactagaatatttgaacattccagtatacattccttcattttaaacaatttcctttaaacgcagtttgtacccatagcctgaaaccatgcaatcaggaagggtctaaggggccaaggagactctaagataacagatgtcttatgtgtgtaaattccgatacatgaattaaaacatgcactgaggtctgaccatgatggctcacacctgtaatcccagcacattgggaggccaaggtgggaggttcacttgaggccaggagttcaagacaagcctgagcaacatagcaaggcctcatctttacaaaaaataaaagaaattaggcaggcgtggtggcatgtgcctacagtcccggctcctcaggaggctgaggctagaagatcgcttgaacctggaaggtcaaaactgcagtgagccatgatcatgtcactgatctcaagcctgggccacagagtgagactctgtttcatatgaataaataaataataaaaattaaaaacaaaaaaaacatgctctgagtaattctgtggtgggggtagtgaaggaaaagtaagcccctaaaggaaagcctctaaatccatcagcaaaatggagaagggtattttggtttccaacgctcaatctcaaccccaggccactccaagagctgactgaaagactcaatcctgtattgacaacagctgactggtcactttcttttcaccttccagccacctgcccatcagagctactacgacagcctttgtcttcacgacacacaacctggcacacaatcttcccaatcaactgtactctagacaaagctctgaccataaaggtgttcacttttatcacaacagacctacggcaattttagagccaggagtcttttattctaaaagtaaggctattaagtgaaactactggaagcagaagttgcactaaaattcaataaatggatacagttacacgtatacacatatatactcaacctattgattatactacttcttcattcaataaacagtcatcactctgccaggagttagggaaaaattagtgagtaaaatagaaataatctatgtcttcttaagagttctatgctgctttgggagagacagtcaaatacctccacatgtatgtaattatgaactataataaattatatgaggattaaaggataagacaatatataaaagtagaaaccagtgtaggctggaatgtcaagaaaaacttccctgaaaaataaactttcggactgatatcagaaaaaaatgagttgccattaactgttgtgaaagtgatacagggtagaacccaaaccagtgaggggaaacagcgcgggcaatggctctgagacaggatcaagctgaatatcctgtaggaattgaaagaaatttatgggactgaaaggaattcagcaaaggtgaagaatgaccctggaggggtttaagcctgaagggctttgagggacagtagaagtctcttgtctttgtttgggttcctcagaagcagaccatgagacaaaggttccagttggaggtgatcccaggaaacaccagagagatgtgatagagaagggaagatcaagaatgggtgaccaagcaagtcaccactgcgggcacctgagcttcctccagctgccagggaatggggatccggtataggacacgtacctcggaagtatctcacccaagaggcaaagcaggccgtgtctttactcattgtttctcagtactcttggattgaagggtactgtgtaggggagggtgaaacattaatttcccagcacctcacaacagcatgcctatagttgagcagactatgctcagagctcaccacagaaaaccctcaggccctgagaagctgggccattgagcatcacaggggtgagacggaagggacctgagcaggtcgctcatgtcatcagctgcatcacgccaggtccactcttttgttctccttcctgctttcagagcagcatgagtaacatcagaaagcagcagaatttatatctccatttttattgtattcttcacacccttctacatttatataacggtactgcactttacttgtgtcagtactaaagtctcaactacacctgtctgcagtaggtagggtttatcactcccattttacacactggaaaactggaaattactgaggcaggacaaactgctcaaggccatatatctaaaggacaagcactatgattcaaattcaaggcattagttcccacagtcatttttattcccaccatagcatggtgacactagtgacatatgacaagagagtctacaaattcgattaaatcttaaccatacaattgacttaaggatccctaggaaaaaaaggggaccccattacttagtattcctaattctaaaatgtatcagaatacattttgaatgataaaacataacaatagaataaaaataaaaggtatacctttcctccctattacatcaatatttaatagattttaagtgacgagtaagcatattaattatggaaaacaatggaagataaggagaggggtctaatatggttgaatttaacaccatctgaaagtggaggacaagtacataaaccaactctcttagcatgaagataaatgtcaccaggcaggtcttattatatttctattagacctaagcttctagttcttctgctttataggtgagagtaaatgagactgaactgggagagaagcatggctttctgaaattctgtctatatatgaaaggttcaccaattatctccagatcaatttctgaagcacatgtttgggaggccgaaaataatttctcatgtgcaagtattgcaggtcaaatgtcagcttcggggacagaggttgtgttttatagacgcatactttaatgtgattctcatactctggtttatgatttgccttttcaaagtgaatatttccactctgttggccagagcgctggtcttactgttgattatgtgtcaagacttgaacatcatcccacattgtctgaaaactgagctcttccatggctttgcactgtgcagtgtgatgagaatgtaaagaataacctggtctgagaatgcccagtattaaaaaaggaagaagagaaacctgtaagtaagaaagcagatttttctgagtgcccattttctgaaggaatttctgctgactttgcagcccagcgccctagttcccaatacgcctaactccatttcctgcaatgcaccttttctagataattgttgtctcagaagggtgggaatgtatttatttttctcaatatgacaatatatttctttcaaaggagatattgcaataataaggattattgcagtttcttacaagagaaatgtttgatgttggggtaacattttttatcatgctttgtttgcatatactctaaattgtgtagcacaatctattttcagtattctctccacctggcagttaaaactaatgtcaatgtggtgggaggaaacttgtactcctgataaatttcaaaagcctgtcccccttcctcaggaacagcctatacccatgttagaaattctaattcctttttaaatagttttactttaatttaaagaaagctcaggcatagaataaaatgcccactaattatggaatctaaatttctctatcaaactcacattgagaatgtaaaattgtatattggacctatgagacacgcagatagacaattccagtatggaatttgcaggctacttaatttgaatttatcaacagtttatttatttatcttgttaaatataaaataattccttctagtggttccttttcctactgtgcctttgacatatttgagaatattaagtgaaatgatatttatttatttagttaatgatctatttattttattttgagatggagtctcgctctgtcgcccagactggagtgcaatggcacaatctcagctcactgcaacctctgcctcctgggttcaagcaattctcctgcctcagcctccaaagtagctaggattacaggcgcccgccacaatgccaggctaattttttgtatttttagtagagatggggtttcgctatgttggccaggctgttctcaaactcctgacctttggtgatccaccctcctcggcttcccaaagtgctgtgattacaggcatgagccaccgctcccggccaggatatttattttaacttgtcccagatcagcaatacattctgactccatatttgttttcttcaaagtttgtagtagatataatgtttgagggtagtttcatttgattctaactaaatacacatcagttccatttagttaagtgaaattagagaactggcactggggataatgccaaaaaagtatttaacaaattatccccagagatgttacttgatctcaggttcttgtcctacaaaagactaaaatgttttgtaaagatattatgtcctaaatccttgctatcacctgcaatagaggaactcctcagtggtcctaggtggtctactttttcctttttatactcttgtccatgccatgtgtcacgaatgtacatattacagatagaaattcataatgctaagaaaacaaagatgacagatgctctcattttgaaaataaataatagtgcctgccatttttcaaatgtacttttacctgttttgtgggcagattgttttacaaaaaaaaacaaaaaacaaaaaaaacaattacagttctagacatccgtagatattttgtggttttgccactggccacaaaccacatttaaagaaaattcttgcgacttttactgtcactgatttggcgagactttcagcaaacaaattgtttcaggacattgacgtcagtaaagtatggtgcgctggatgatgcgatatttctcttataaagagtactcaacacattgctcactcttcagtcagagttggtaaacatttgtactgttcttagagacaaaaggacatacgagcaaacttttaaaaatcggaattttcaatatgattatgggcactaacatttttcattcattgaagattttaagaagaggatataaattatttttaaattgaaagatataaaactcaagcctgtctaaatgacttcaaattatttaaagtattcactgaaagaaaattaagtttgtagaattaaactatttttcattgagccaactgttatgtgatacttagaaatttgttttcacatctctcatttaatcctgaagtccacccttctgtagatgttattacttctattttacaaataaggaaactaaatgccagataaagatattatatgttagaatagtgggtttccacagttacttgcatattagaatcacctggagagcttcaaaaatattgatgcctccatcctagccccacaaattatggtttatttggtctagagtgtaaccagggctttggaattttgaagagattcctagctggctccactgtaaagataaattcagaaaacccttggtcacaagcgagaatcacgtactcttttatgtggaagttcttagaagttattcatgttctacatttcattaaatgtaatctagggtatttatcagaacagtctaaaatttgagaatacaggactactattctcaatatcacactttcacaagagagattcttttccttctggcttagtgatcacctacatgcctactacatagttttgtcattatatatggtcacaataatgtctaaatttgatgagtacttcctctgtgccagacttgactttacaagtgactcttcaagtgtccataatgctgtaaggcagtctatttactcctcttggatgtggggaacctgagacacagactggtgctgtagcttgctaaaggccccagggctagcagagtggcaaagacaagattcagatctaatctgccagaatgtcttgcccatattcctgatcaccacaccgcctaatacgacttccatatctgtggatgataatgataaaatattttcaggtaggagtgacctgcacagctaatagtcaagtgttcttgtaaaatcaatcactgaggctattttgactttaatttcttttctaaggctctggctttccttcattctagctcagaaaccataactgggtgcctgatcttgcttctttctccctttctcaaaatatattactgtgttcccactgactgttcattcatttaacaatgaaagaaaaaaatagaatccaattcctggaagctactgttacttgggatttctgtcgcacacagccaaagtcttcttaaaattattcacagaagatggaattaaatatagacaaggctcagtcaataaaaggcgcaaaaatttcatgaagaactttgagaaagacacccacatgtccataagcagagcagctgagtagaaagcaatagatcccctgtgaatttccctacagcacactgaacttcaagagcttttccactgtatttcatggcctattgatcctaaaacagtgttttaagaaactatatagaaaatatagacatattttcttcttaggaattatgtttgtgcatgtgttaatgacccaaatagtatctaacagaacggacttcaaatcacatgttgtactactacacaatatactctataatcctgtgtgtgcagaaaattcaatgattgtgaaaaaatacagcagtttaatataaaagttcaacatttagttcaaggacctaagaatgtcagatagtaataaaaatcaacctacaattagatgaatgatgatttattttgtattactttgaataccaagataatattctattaataaaagcttccatgcagaataaagtgagagctattgagataccatcagacttttcttccacagcactatataaaatggggcattggagaagtatttttagagtttcaggagaaaagtttgtgacccaagatttctaacctcagccaaatcaacattcattagtgagagcagaacaaccttctcagacacaaaatgactcaggaagtatgctacccacttatctgtcttgaaaagattactcaaggaagtgcttcattcaaccaagaaatgaatcaaaaccaataaattaactcaatttgagggtatgtgtggttcaaaggaaaaggcagtgagtaatgaacttaacacagagttggtgtctgagtaattgttataaacatagttatgaaacttgacaaacgtcaaaaactaactcatggatggaaaagaacatattgttaaaaacaaattaacagcaatatccagttttatttcaataaaataagaatagtaacaggactgaggaagaaagaagaaatgccagtattttaaatttcttattctgatatagtagaagaatcatgttttatcaataacgtttattgatttatttacccatttagcaaatagttgttcagcattttcctgtgcaaagatctggttcaaagttggtgtggcagagattaacaagcaggactggctctctattcatactgcatacaatttaatttacaaattagtttgtttttaatgtgaaaaagaagagggtaaagatagtgtatgtaacttaaaatcactatagcaagtaaagcgttaagaaagtttaagcgatatttcaaaaaatagaaacaaagatcagatgggaaacaagaaagcaataaatgcaaaagtcatgaaatgaagttcatgagaaatttcagtcaacttgtatagatttaacatttgttaaaagaaagtgatttttagattacattaaactatttttagatgtaaacaggagacactaataaaatgtgatgacaatattttcagcaaaatagatgaatgggcaaactatgacaggaaaatgtagacaaaaaacaaaggcagtgaataaatacaagaaaaagtagaattctaggcaaaattattaaatttaaaaaagagaaacattttatattgataagggtttagttcacagtgaagcagtaataaactgttaggcatcagataacattcgaaatatatgtaaaacacaaataattacacttaagcaaattaaaattatacctatatataattaaaatgatttgacattgctatttcttcatcaatgctagatgtaacagacaaaaattatatttaaaacatcatataaatttaatgatttaaaaaatgagctgattaagcagctacatacacacgtgatacacatattaatggaacatatataaaaaccaattctactgtagttaaaaaaattctaattatattctaaagtgtagaacttagccacatactttgatcataccgaaataaaactagaacttaaaaagagaagaatgacagttaagactcaaactacttagaatgttaacaaataaatctcctaagtaaatatttggccaaataaaaaaatcaaagctaaagatttagagaatttagaaaataacaataatgataattgttaaggaatatatgtaaaaatttatgaaaggttctgtaaacctatactcaatggaaaataatattttaataataatattaatataaataagcatttgagtcaaagagctagaaaaataaaaatttgatatattgaaatgtagtacatttataatctttaaaaataattatatctttttaaatattatgactttatcatttgtatatcatcagccaaagaactgcccatttcaatagtggcttttataacattaaagacaaaaatacgtggttcttaggtcagtttcagggaaatagtttttcttttcctcaaatttgttggtttatgatttttaaactaaatttgtctttaaattgtatgtgcaatttacagcttactttagtttgcaccccattatcctcaggttaatcatctattttgcactgtgtttaatttttaaaccaatcccaaatggacttagtggcatgacagtgctctgctagtaaatgtttaacagccaggacactgtgtgttgggggtgaggaggtgtgtgtggtggctcaggggcactgcagatttaaagcatttgctactttctgtgatgtagagtctcaccacgtccaatttcatgctaccaccttgaggatactgaatgtaaaactgggaaaagatgcacagaattagctcttgctatctagtgcaaacacaccaatgcacatatactgaatgtatgagtacctaatgatgggtggatggatagatgggtggagggaggcagggagggagggaggcaggtagggatggaagtagggaggagataaaattattccttgaaaaggataccaaattagccaatatattctgttgattagttttttttaaacaaaaaaaatttaagcttggtctttcaatgccatttctgagctaatatattttgttgaaaatctttaaacgactatgagggaccattaaaatatcagtatcaggaataaacagaataggaattctgttataatcagatacagctttgaaatagatttgaaagtttctcttaaaagtactggtcagtactctgctccttggttcagcaaccacaattcactgcactccaacagttcttaactaacacttgtgtacttgtgtaaccttaactactagatagttatcgttgataaactgcccaaagttctaaaacattaagttctataattgaaggaacactacaactttcagcaactcccttaagttagacaaggaaagtagtgattctactcttgatacaatttttttaaggactagcctatgacagcccatttatgcctagtgttccattattggaacgctaagcaggtgggagttatttatatcctactgcgcaaggtcatagccaaggtctgattgtaaaaattcaaaaacttgaaacctcagacatacatgggttaaattcttagttaagtggtgcataatttacattttgtccccactatatcgactagaaatctgaaggcctgagagagctcttacctagtgaatggctgggttccttgactcagatgtatgagatactaagcccagcacacaaactttataaatgtttttgaactgatctttttgctaattagtctaggttctagattcattaaattgagtttgtatatatacacacatatatataaaaaatatatatataaatcttaccacaactcaaccattacaggcctcactatttcatttgtcaagtcctagtcccagtttgaaattttaaaacagtaaaatataatgaaattcacatacaactaaaatctttaagttcaacacagtaacaaaagtgttctttgactataatattattcttggtgagaagtacaactaatcatttggtataattcctattgcttgtaattgctcctcttagattttttttcctccagatttcatcttaccccctcaagatgctaccatcaaatgtgaaaagaagacaatttgtgatccaaaaagcaaacccccaaagcagtaacattacatcttaaatctttccaattacacctccagctactaagcggttaatattttgccttctctacagaccactgtcaaatcttcatgcagatgacttggagcagttgtgctggatttgcaaagtatatttgcaaagacatggaggagacgataaaaacagttgctttgttatgaaaatatacacatacatatagtatgatgggtgctgcaatagacgtgggagtacacgtacctcttcgagagcctgatttcatttcctttggctgtatacccagaagtgagattgctgggccatactgtagttctatttttaactttctgaggcactctcctactgttttccacaactgctccatctttttacatccgtaccatatgtgaccatatggatgaacctggaggacattatgctaagcgaaataagccagtcacagaataacaaatgctgcattattccacttataggaggtatctaaaatagtcaaactcatagaaacagaaagtgaaatggtggttgcctggggctgggggaaggggaaataggaagttgctgttcaatggatatatagtttcagtcatgcaagatgaataggttctagagatctgctgtacagcattgtgtccatacttaatactgtattgtgcacttagagtttgtcaagaggctagatctcatgctaagtgtttaccacaataaaaaatgtttaattagaaaatgctaaataaaatactagcaaattttaaaaataaagaaccaggatattgtctatttaaagagtttccaacattatagagtaaatagatgattattttagaatcactttatgcatgttccacttaaacatgccaaaggaactttctgctaatgaacatgttaataactggaatatcatgttcaaatctgcaaaggagggatgcaacacctatttaaaggaaaattcttacatatttctatgtaggcattgaaaatttctaaaagagcagctctcagaaatcacaaaatttataaaagaataaaggaataattcagtgatttatggaagccatgctgcaaataattaaagacaaaacctaggcattaccattcaggacataggcatgggcaaggactacatgtctaaaacaccaaaagcaatggcaacaaaagccaaaactgacaaatgggatctaattaaactaaagagtttctgcacagcaaaagaaactaccatcagagtgaacaggcaacctacaaaatgggagaaaattttcgcaacctaatcatctgacaaagggctaatatccagaatctacaatgaactcaaacaaatttacaagaaaaaaacaaacaaccccatcaaaaagtgggcaaaggatatgaacagacacttctcaaaagaagacttttatgcagccaaaagacacatgaaaaaatgctcatcatcactggccatcagagaaatgcaaatcaaaaccacaatgagataccatctcacaccagttagaatggcaatcattaaaaagtcaggaaacaacaggtgctggagaggatgtggagaaataggaacacttttacactgttggtgggactgtaaactacttcaaccattgtggaagtcagtgtggcgattcctcagggatctagaactagaaataacatttgacccagccatcccattactgggtatatacccaaaggactataaatcatgctgctataaagacacatgcacacgtatgtttattgtggcactattcacaatagcaaagacttggaaccaacccaaatgtccaacaatgacagactggattaagaaaatgtggcacatatacaccatggaatactatgcataaaaaatgatgagttcacgtcctttgtagggacgtggatgaaactggaaatcatcattctcagtaaactgtcacaaggacaaaaaaccaaacaccgcatgttttcactcatagatgggaattgaacaatgagaacacatggacacaggaaggggaacatcacactctggggactgttgtggggtggggggaggggggagggatagcattaggagatatacctaatgctaaatgacgagttaatgagtgcagcacaccagcatggcacatgtatacatatgtaactaacctgcacattgtgcacatgtaccctaaaacttaaagtataattataattaaaaaaaagaaatggcatcaacatgaagctgcccattccactgaagttctgaaatctttcatcatgtaaataatttccatatttctcttttataataaactaatgataactaatgacaaaaaagaaagatttaagttgaaaatagaaaaaagtaggacgtgtctaaatatcagtacaagaattaataaaaagtggagttttcttgtctcttctatcaacttaatatcccaagcatcaacgtagattgatgactctctctaacattaaaaaaagaggaaataataacataattaaaaagaaaaacagaaaaaaatagtgaaatgcaatcacttccaccactgtgactttggtcccggtcttcctcatttccagtctcgattatagcaatagcatcttaactggtttctctgcttccaagcttatacattaccttctgttctgcacgtggtagttagaataatccctagacaaccaaaatcagatgaagttattcctgtggttgaaacatcacattctggattaaatgctttctgtagtctaaaatgtcctaggcatataggacattttatcttttagacttcatctccaacgactttctctttttcttttcacttgctcccttcttcccaataagaatgtaaactacgtgctaggtgggactttatgggtttggttcactctgatgcccccagaacctagtacctttactaaagtaggtcttcacacatttgctgagtgaatgaagtaataaaaccaagtgatatgttcacgcaacggaaaactatacagcagttcacatcaataaactaaataaatattatcagcctggaaaatatgtcaaaccacaatgctgagaaaagttgaagaatattatgttgaaattgaagacatttaaatcaaagtggcctagtttggagaatctgtattacttcctccaccaaaacattcaaagtttacacacacacacacacacacacaccaattatttataattttaagatgagaaagctgagtcccaggaagtgtgatcacttgccttaagtcacagagccatgcgtgagtaatgacatggggcaaggactgaaaatgaccagtttacttgcctccttcattcttccaatgaccttaatagtgctaagaattttatgccaaatagcactcagatatgagcttcctgagagctcctcagtgaaagcaggaccaccactattctctcttttcttctttctcaccattaccataggtgaagtaagtgtgaatattactccaaaaatgtgaatgcaaaaagcaaatcatttctttctttttcttgtctcttacagtgtacaccatgccgcctacatggcgcaaaatttactcaggacttatcaatgcccaccctcccctcacaccactgatctgtgagggctcagagattgtatataaagaaaaatattcatgcaggcccttcagtcatccttgggtcaccctgatcattatggaatggcttaatgtccaggtttgcatctttcttgcagcccctaattaaggaccatgcttgagcaacatgcaagctctgtgctctggggagccttgaaatgctttaaatccaccacatggacagtgattcttctaccactttccatgggttcccaccactcataacatcccccaaattttgtgggagttgtcttgggaataccttcttacctcacctggtggtctcgcctgccacgtatatcatgttgtcagttgtcttgggctaatggaaaaagaaggtgggcagggatggggaggatcagtgggaagatgagtggaaggcagatcccgagtgcagtggtgtatgaagcctacccataaataaaagccaagctacaattgtgatgtaagcaaggaaggagcagttcatgatgccgtgagggactttgcaagaatttcttgagaaattcccagtcagcagaggcctaaggtataagtaagggttaagaaagggcagcaggatgaagagcatcctgggggaaaaaaaagctgctgcaatgaaacaaagtgggagggaacatggtgcacgtgccacacagtaagtgctcggtaaatgcgcgttactgtaataataacttattattatcactatttagggtatatatccaaataagatatttttctctgttcagaacagagatgtttggaaaattaagcataaatacaattgaaaacgtgagaaacatccaatacaggaagtaaaaagagagacaatcaaagccatggatgtgagcctgacgggtttcacccagccctaactaagagaggcaaaggacagcactcatgaacagccagatcagaggggggaaaaaagacttttcctgggaaggctgggtttgtaaaggaacattagggaaagagagagaacaacatgataagctgcattctcacacatttaagatacaattcctttccccaccccaactctccaggtttcctgaattaattggaaggaaactgttatatttccttaattcctgaagtgggagttaaatctaaatctaacaaatgacattttctttttcttttcttttctttctttttttttttttttttgggatggagttccactcttgttgcccaggctggacaggctggaatacaatggcgtgatcttggctctctgcaacctccgactcccaggttcaagtgattctcctgcctcagcctcccaactagctggaattacaggcacatgccaccacacccagctaatttcttttatttttagtagagacagggtttcactatgttggccaggctggtctcaaactcctgacctcgtgatctgcccacctcagcctcccaaagtgttgggattacaggtgtgagccaccgcacccagccaatgtttccttatttctatttttatactagtagaagtttcaactgaccagtctccactgaatgatacactaagccaagatattttaattttctctaataaatgttttcacttcttttcttttctcttttctcttatctcccaagcacagccatcccaccataggaaaatagaaagaaaacttaaaatttaccaatggatagggcatcagtccactcaaacagaaaacagtaagtgctgcaatgtgtagcaagatctgcttattatatctttagtttccttcaagaagacatatggttgaattcgggaacccatttcttcttccccctgaaacttacaaaagagtggtacacaacttcctctttccttctctcttctccccccattccctatccacacaagctcctacccatccccatagcctcaggctcctgaagtgatgagatcacaggcttgggccaccatgctggctgaagatactcttttaggggtagatggagaccctgtcactgacgatttgactcctgttttctggccagttcttctgaagcctgtgcttaatataaccacagaatgtaccttttgaaacttctccagcaactgaagtaggtgacaatctaaacataaaagtacttagaaattccagttatcattttgaaacagtgttccttttgtttcaagattcacattggattagattagtttggccctgagaatacatattgcttgccagtgatctccagacatccttaacactgccccaaaataaaactagacccccagccccaggaaaagatcaacattgataaaggacacagcatggtgtgtgtttgctcaggatttgtgtcttcttaattaaatatttttcagcccctgtctcagaaaatggaaagcacaattgaagtaacacaaggcacatagtgttttaagattgtctatgaaatggaaactaaaggccacaatattatactgtagctattactaagtaactttcaaggctattctttgagaacacaaacaatagaccaaaaagtcataaaatgtgttaattttattaaacaaaaaatgattgtgtaacatttcctaaaagtgatattatcattatataaccctcactgataataatagatgggtggatcttttttttttacttattttattttattattattatactttaagttttagggtacatgtgcacaacgtgcaggtttgttacatatgtatacatgtgccatgttggtgtgctgcacccattaacttgtcatttagcattaggtatatctcctaatgctatccctccccactcccccaccccacaacagtccccggtgtgtgatgttccccttcctgtgtgcatgtgttctcattgttcaattcccatcattttaatatgctttaaataaaagggtggtcagccctgatttcacatgggatgtattcactatgaggctgaatcactcctgtcctttatcatgccgcctatgtctgtcccaagaatgttgccaaagaaagtaatactggtgactcccagtgtcctggaatttctcaaaagtttttcacagaaccatacttccgacagctgaattgtttggaaaataattggcatgctacttactgaattacaggagagtctatctgaaattaaacttgaaatcaaaacgaaagcctttacgggattccagcaaaatctgaaagtgagatcaaaggcagtgaaatgtgtaattacatcacccaaaagcttattttcaataaataatttggacatgtgaacctactaagtgataaatgctaatcacacattcactcatttaagttctaaattcaatctgaaacaagcgagattacatttttaaacattaaaaatttatttatagacttaaagtttataacttatttactttctaaattatattgagattatttgcaataattttaaaaataagatttttcttcctaaaatgccaatagaatcccttggagaaatacggtaggtactacctgagaaaattcagggttacattattaatggcaaagtggtagggaagtataatttggggagaagagtgggagagggaaaaaagtttatggatagattatcagcagtgactgccatgggagggttatggagctattccagaacagtcttggcccagctgaagccccatatcctgttgatttctgattaggacatactccatgtttgctcacccatcgtgagtcagaatcaagttttgtcatgtggtggatgggatccatctttacaacttgaatgccacatattgcaccaactaccctttttatacatgggatttaatgtgtaacttttggatcaacctaatgattatacaactttgtttactttgtattacatgattaattatgacataacagaagtgggttgaaattctcccactactagagtgccatataatgtaacaatttaaaacatagtccctggaacacaactgcctgagttcaaaccctcacctgtgttgctctgaaaaaattccgtaacaccagaaactcaatattttcatcaataaaattggaagtaataagcagtgattaaatgtatgaactctaaaacaaaatgcctgattttaatgttggcattttctacttatattctgtgtgatctaaaacaaattacttaatttgttgcctatgcctgaattttctgatctataaaatgacaataataatagcaatatagcccaatcagttcttaagtaaagactaaattatatactattatatacctaattgcttttccaaaagattgttaaaaattgcccctattcttgggtactatcagttttatttttaacagtctgatagaaaaatcaactgaattttaaaaataaccctgactggatgaactttttctcatagatataatgcccatttttaacatttattcaaaatctttgcaattctgtttgttattaacgtttccttgtaattttgtggaaacttgctatatgtgaagagtatttcatctttgtctaattttcattcatttattaattctacagatatttactgagtgcctactatatgctagaaactattgcaggtgctggggacacagctatgaacaaattagatcaaaatccctgcctttatgaagctgatgttctgtcattgagaccaaaaataaattaatcaataattgtatgctctaggaaaaaaaacagtaaagggatatagagtgcttagattggggaaggattagttgttttaactagagtggtcagggtgggcatcatgaagaagatgacacctgagcaaacatcttaaggaagtaaggagaagagacactgagatcaccggggaggtaacatccaaggcacaccaacgagcaaatagaaattagacacgaatttggctgagatgtttaggaacaattagccagcggtgcaaacaagaaaaggtggggcaagaagaaataaaggagtgcagatgtatgatgtatatatgatattataaggtttttaactttaattttgagtaagatagaagcaattggaaaatttgtggcagattttcatgatctgacttattttttaacaggttcactctgtctatgatctttaccatagactatggggcaaggacagaagcaagaagaccaagtagaagtttattatagtccgggcgcgatggctgacgcctgtaatcccagcactttgggaggcagaggcgggcggatcacgaggtcaggagatcaagaccatcctggctaacactgtgaaaccccgtctctactaaaaatacaaaaaaattaggcaggcgtggtagcgggcgcctgtagtcccagctactcgggaggctgaggcacgagaatggcgtgaacccgggaggcggagcttgcagtgagccgagatcgtgccactgcactccagcctgggcgacagagtaagactccatctcaaaaaaaaaaaaaaaaaaaaaaaaaaagtttattataataattcaggaaagaaattatggtgtcttgggttatgacagtagcagtgaaatgtaaaatgtagtaaattatggacaggtagagccaacagaattcactaacatattggatagagggtattcaacagagtgaaatcaagaatgactccaaggattttggcctgagcatttggaaagatagagtttacatttactctaatggcaaacactgtgagaagcctgagttttagagagaatatgaggagttcagttctgggcatgttaagtttaagatgcttattagatatccaaacagaaatgctgtgtgagaagctggatgtaagaggctagagttcacgggagaggtccaggctggaaatgtacatgtggaagtcaaccaatggagggtgcttaggccataagactgggtgagatctagaatggagtggaggttggtaaagaagagatcttggggaccgagctgtggagcaatccagtgttacaaggtcaagaaaataagtcagaacaagccaaggcagtggagaaagaaaagccagaaaccgaggagaaaacccaggagagagcagtgacttgggaatcaagttaagtatttcatgaagagaatgccaatggtgcttataggtcaagtcagttgaagactgagtatcaccagttgaattttgtaagattagaagtcatattgacctaggtaagagcaatttcagtggagtggtggaagcaaagtcttcattagaaggaatctgaggtcgaaagggagaagaagaattgaaacagtagacaatcatttctacagattttgccttaatgaggaacagagttatgttacagtaggtggagggtgtgtgacatcagtaaaggatttttttttaatgggagaaattaaagcatatgctttctatggaaaggatttagttgagaaggaaaaactgctggtgaagaaaagagatggaaggaaagctgagcttttccctgaggggttgaaagagaatatcatctactaaaaaagtagaaatatttgctttggatatacagacagaaaattattagaaataggagagtaaacaggtactgatattgataagtaggtatttgtggaggtgggaaattctgcaattttcgctctgagtttttctcttttctcaagaaaataggaagcaaagattgtcaactgaatgtgagtttagggcttgagaataaaggaaaagttgtaaacagagacctggattaagtaggagagtgaaaatctaggaaaatacaaaatgactgatgagcaaaataaagacccatttgaagttagtggcaataaatttgaagcaaaacccatcaatatagcttttttctttccagtattcatctgcctagtgcaggtgtatagtataaggagtgatggatttaatggaaattggggttttgaataaaaaggaaagagatgtcaaggaagttatgattggctttggagtttatctggtaaaagaaggaagcgagtgagattttgtaacggtaagattgatgatagatagatagatcctagtagtggtcaagggatgtttagggtttgggcattttgcagctgtaagatggaaataaatgtagagattaaagagtaatacatattaatagttcatgaatgtgtaacaacctatcctaaaatttagttgtttaaaaaaagcaaccattttagtattatatctcatgatttgcaggtcagagatttgggcaagacttagctaaatgattcttccactccgtgttgtgttgactgtgttcatctgatggctgtcctcatctcagccaactccaagacagctcagcttacatttctggtgccttaatggacttggctggaaggctaacctcagcaggacactcttccatgtggcctgaggtcctctacaggtggattctgcagaatggctcttagccttcttagatggtagctcagtgctccaaagtgagtgtttcaagaaacataaagtggaagctgccagtctcttaaggtcaggtcctggaaagtgatacaactttacttctgttgtatattagtggtcaaagcaaccaaaggacctgctgagattcaagggaaagggaagtgtacctcacttctgataaacagagtactaactgtatcaaaaaatctatgtccatatttaatctgctatcgcagtgatctggacttcttgtggtaggtgacagaaatagagtaaaaaatttcagtgcaattaatgttgatagcctcaacatagaaaatggaggcaatgctatgagtgttcagggattgaaaagatgagggtctttccaatggcagatagagttcttgggcttcttcttgacctttcctgaggaaagcaggggacctgggagaggtgtagtattacactaaaaaagctgtactgcctcttaaaaatctgccatcagaggatttggatgatactttatatgttgaaactatttgtgtctctatatctatcaattaactgtgcttaccttctacctatattttgttgtcatatcttattgtattttatttggcttcatttgttcttaaatatagttcaattaattccttctttcacttatggactgtatttattattatttatatttatattttccccactctacgattataaaaattactaaactgtattttcttctggtacttgatagttgctttaaaaatgttaagtataacaaaaattaagatatacaacacaagttatcatataattttggagtaataagtatggccagttccccaaatgagcatttcattctctgtcctaatcatccctcttcagctatccactatcctgctgctgacggcaatctctgccttggttttgtctataattttggcacctaagcatgcatctctaaactttatggttttcatatccccgtgtctgtgtgcgcatatgcatgcatgtgatatgtgtaactttaatgtaataatttgttttgtgctcttttgtgacctgttaatttcacacaaaattgtgaaagtcttttcaactttgcagcctgggttcatacattctcactgcagtgtgtattattttgaatgaatatattacaattaacttatgcaattgttgacatgcatttggtttgctttcagttcagaattatgaataataatatgaattttcttggtgctcatgtgcatgcatttctggagtggtattgaaatgggtctaagttaaacatatcttccatttggtatctgaacatcaaatgctgtcccattgtaggtgtactgattcacactctcactgccatggggtagaagtgcctttccaccatatgctccaaccaaaatgaccatgagtcattttcattttagcccttctgtgtgtcacaatgtctcactgtggttttactttgcacttctctgattactaatgatgttaaggcacactttcatacattcatagaccattaggatattttgttttgtgaggtttattgtcaattttctgctaggttgtggctctttttcctgtggatttatatgactttttcatatattcaggaaacattccctttgttgaatatgtattctttttacatagtcaattacatttatctttccctttatttttaaagaaaacatccttttaccaaagccatgaatatactctcctgtatttccatctaagaagatttattgtttggccttttacatgtacaacccacatagaattaattttgtgtgtgatgctgatgtcgattaaacttcattttttctgtattgatatggactttcccaattcaactcattttcccaattcaactaaatgaatttcagttcaattccccttctccattgctctagagtgccaacatttttataaatcaagggtccgtatctgtgagtttgtttcggggtctgtggtactggtctatcattttagttaggtgtaattagtaaagcttttaaaacaagtatttatatgtggtaaatcaagtctccccacttctttttttataatagtgtcttaactaatcttagccctttgcatttcaaaataaatgttataatcaacttgttaacatatagcacatttttaaaataataactattatgattttgcctgagagtgccttgaatctctaaatcaattactatgagaataattgacatatttatatgctgaattttctaagcacgatctttttctcacatttattaactattctttgacttatctcagcaatgatttataattttctatgtagaagtcttgcacatctttctcaattgtagtctaaggtatttgatattttcacttcatgtaaatggcatctttttcattttatttttctgtttgtggcttatatacaaattgcaatcatcttatatccagaaacctagttaaatttgcttatcaatttaattaattaatctttggattctattggttttctacattcaaaattatattactcaaataaagacaattttatgtctttctttccaatgctttgacctatttttagccatcctcttgtgtggaccctccatgtatcatgttcaggaaaacttttgcaagcagactggtcatcttgcttcagggtccatcccaattatacagcttccaacatttactattaacagtgtttgctgttcatacacatatatataaagttcctttctctttctaattttctaagggcttccatcattaatatatacattaaaatttattcaaccccttttattaaatagtaaaattaacatttttttcctttattgttactattgatatttacatttatggagttcaaatgttaagccaaacttgattttccagaataaaacacaattattgtgatgtgatacattaccctttaattttgttttttcactgagcttttaattacgacttttgcttctgtgttcatgcctgggatccaacctctaattttcttttcttgttatgtccttgtccacttttgatattaaagttatgctgattgcataaactgagtcactaagttgggaaacatcctttttctttctttgaaagagtgtaaatgttttattatttatgtttttagttgtttgtttctaatgaatgataaaattctctggggaaaccattggcctggagttttcttatggaaatattttagtcatatttgcaatgtctttagtagttataggacagtggggttttttttctgttcatttttctacaaacttataatgtgtcatttcccaggaatttgttatttcatatgatatttaaatgtatatagtatccatgtcttattttattatccacagaatatattgatttattctatttagttgacatttgttatttgtgccttttcacttttgttttaattagtcttgtaactggtttatcaactgcattaaatctttttaaaatatcattttagattagcttactttctctattttgtatctgttttctagtttgttgaattctgctcttacttctattattccctttcttgtactttatttctgatatattttgctaatttctaagatggatactaaatttattgatttactttcttttttccaaaatattcatttaaagctatatatgaacttttaattattacttcagaaatatcctatatacttaaccttgtattagatcaactttgctcatcatatttttcaaattttcttcatgcttgttgattttttatatgattaccttatcaaatgcttctaggaaggtactgaaatatccattataattgtgagtatgcttactttttcttgtagttctaaggccatgtttcaggtgaatacagttaaaatttttcacaatttctcatgctagaaagtttatcaatggaaattatctctccttattttaggtaaagtttttgtctcaaaaagtactttgtatacgttttttctgattttaatataacaaaccctgatttatgatctattcttttccattatcttagtttcaaaccttctgtatttctattgattttctccttaagtggcatttagttggttttgcttttttattttaatctagtttcaatatagatatcttttaattagagcaagttgtcttgaattctactttttcgattagtgttattataatttttcctataattttcttgcattgttgtattagtctgttctcacactgttaataaaaacatacctgagactgggtaatttataaaaaagaaaaaagaggtctaggactcacagttccacatggctggggaggcctcacaatcaaggtggaagacaaaggagaagcaaagtcatgtcttacatggtggctggcaagagagcttgtgcaggggatctccccttattaagccatcagatctcatgagatttatttactatcacaaaagcagcacaggaaagacccacccccattattaaattacctcccacttggtccctctcatgacaagtgggaattttgggaactacaattcaagatgagatttgggtgaggacttagccaaaatgtatcgattgtcaattccttctcttaatttttattcttttttctttgttgttttaacttagatgagatgctcaaaaatcagcatatgagagtctcagatatttttggtcaggtaacagagaaatttaatatagttccatgtattctcattaatgttcttttcttcttccatcacattataaactcagaaaatgttttgattgatttttaaaaactgctacaagtactaagatcaggacataattttctcgcactcacattgactttgaagcatgataacctagtgattttgaaccaattagacatagcatagggctcagcaaagaaattatgtaatcatatggtttgttattgatgacatggaggaccaatgtgagcatgtgacaggtgtgcagctgcccaccatcatacaaacaaccttcccaactgggagtcaagaatgtgctttttcagctgcccctgaagataagacacagagggagcgaggtttcacagagcagatgcaccaaggagatgacttccattcacaagaacgcaaagttaggaaggaagcaccagaaataatacattatttatagaagacatgaaggatggcaaagtcagttcccttggggaaatgtctagcatcatctcttagcatcctggatgtgagttgctggtttctgggtttcagcagtgggttatttgttgtagcaactcttatgttttttgtaagtttttcctggatatgtagctcctatctctgatcatctagccctcttggaaattctctgagctatcaaatatcctaaataccctttctgtggaagccactcaaaatgggttgtcttgtttgtcactagaaacttcagctgatataagtgaacggaagcaaataggcagcaagatctgcatttcagaccataagcaaaggataacagaaatccatcacatcaattccaatgctacccactttgagttcagctaagaattcagatcaactttacttgcattatctttttttttttttttttggcagagtctcactctgtcacccagcctggagtgcaatggcacaatctcagctcactgcaacctctgcctcccaggttcaagtgattctcttgcctcagcctcctgagtagctgggactacaggcgcgtgccaccacacccagctaattttttgtatttttagtagagacagggtttctccgtgttagccaggatggcctcgatcccctgacctcgtgatccgcctgccttgtcctcccaaagtgctgggattacaggcgtgagccaccgtgcctagctacttgcattatcttaatgaaaaataattgtttcttctaaaactgttacttctggttttgctgagaatgctaatcacttaaaaatgtagatgaaagaaaaaaataagttagtgaagttgtgtgtggcagtagatatgttgaatttaacaaaatatgtttaaaaattatgcaggaaaagatttctcagccttatcactattgatattttgtacaagctaacctttattgtgggcagctgtcctgtgtgtgtggtgttgagcagcatccctggactctgtccattcaatgacagcagagctcttaccaaccaaacacatctccacacattaccaaacctcacttggaggtcagaaaggcaaaattgcccccctgctaataaccactgatatcgaatggtaaatatatgacaagaatgctgtctgctgcccttcccatgcatatcagaattattgatagtgcttcccagcactattttctcttgaatctgatttgactcagaacccttctccacacagcactgtatgcagttaccattaattaggaggagctggagtgtaaaacaaaaccctatggatatccctattgttgtttactccttggtgaatgtccgactttcccaactcccagttctgtgctgtatactcctgctaaatcaaaatttgtctgggatccaaatttctaactcaagttggaaaaggagtatttaggattaattgaaggtgcagtggtttgcccattactcattctgcttctcctacatattcaggtaatgaatgggtcctgcagagaaaagtttcaagatagtggcaatgtaaagacaaattaatttaagctatgtagcagtggactcaatataactgaggactgtttccttgggagtgtttgaagagtctggcagaaggaaataatataaaatcctgcaagaaagtcttgcaggattaatgatggtaattattaatgttagcagagtgccacctcttataaaaaccttattacttttaatgtttaatccattatttaattgtataatagacaccagttaaaatacattttagtatgctatatatatatggacatcttgcaggtttgtgaaacaaaggtctttttaaagtacatcatctttaaatattacctttagtatccctttagaacatccaaagaggtatttttgaaagttgggaaaatagatttctgcaagttgatctctttaaccctttgaatattttatggcatatttgccattggtgtgaagtatgaaaaaagaggtatttggggcagacctgcattctatattagactcagactcaaatatagttgtcaaataaaacatcatatacactacttctgtggtttgcgtaacagaaatcatcatacccattgctacactatttacaggaatattaacctcttgacttagtatgacaattacatcatatttcctgaacaaatatttataaaagttgaagtttcttcacttctttttacttaccacttgttttacaagggacatttcacatctctgtgcacataattctttgctttattttcactatgatcaatgctcaatatatacttctatttttaatatcaaatcaatcaatcatttgcacaaatcatctgataactgacaaactgcaggttttccaagagaaagatggcagaaacccgatcataacaatcgtcacaaagcaattatcatctgccactgctgctaacctgggccagtcatccctctgtattgaacaataaccagaaggaccaagagttgacctagaaccagtaggaggaggtggaaggtcaatgggtgattggggagccagcctcatgcattgcctcctggcttttagtcaaggtggcctactgagccttaagagaggatgaaaaagaagagaaaaaatgacagaagatggacttctttgacttgtcaccggccctggtatatccataactgatgagaagcacctttgggtgttaacacgaatatattctacataagaccctcactaactaattccatgcaaatcaattgagttatcactatatgtattatatgtatatattatatatatattttatatatattatatatatattatacacacacacacacacacacacacacacacacacacagaggtatattatatttgctgaaagagatagacaatcgtccctgacttctcaaaggtgaaattcttgtgaatgatgtttgattgtaatgatatgttttgcataaagccatgaggggaaaggtaatttctcatatcattgtatgtataaaaaatttcaagagagaattacaaaggtataaggttgtcaaatcccagaaaagaacttcaaaagatccttgtggacagtgttctccagtgtatatagcatgtgtcttactgcctgagagggtcttcaattatgggaaatagtactaaggctattggcttaatagaaaagataaagattgctagaataaaataagtaaaccagaaatcaaaataaagcatgtaaaaccaaaatggagtgctgaagatggcaagcagaacaatgtgacaatgtgagaaaaaaggaaagtatgaatgaataatcaatacattatacatgggacaccacttatgaagaatacctgaatctttcaacgaataaaaggaagaggctgggcgtggtagctcacgcctgtaatcctcacagtttgggaggccaaggcaggaagatcacaagtcaggtgttcaagaccagcctggccaacatggtgaaatcctgtctctactaaaaatagaagaaaaaattagccgggcatggtggcacacctgtaatatcaggtgcttgggaggctgagacaggagaatcacttgaacccaggaggcagacattgcagtgagcagagatcatgccacttcactccagccttggtgacagagcaagactctgccaaaaaaaaagaaaaaagaaaaaaggaagaattttccaaaagttagctattcagcagtggaacagttggtcggctataacagtgtgccacattcaagcagaatctaactacaaagtattgtgggaagagttaattatttatacattctaaaatccctaactttaaaattatattattacaacaaaattcaatacacagacaagggagaactagtgtagtcatataaaatgtgggaaaatgcactattgcccttgtacaggcaaaacattttctacattttaccttaatgtaaaatagaaaattaggctttttaatcatttttctcaatgaggtcaacctacaaagatggatgaccctgaagtcaattttcttaacagctaatctaagttaagctcattcccttgtatagaaaatggcagtctactgaaaaattcacaaatgcatgttgtaattaatgtatgaaaaaagagatggacaatgattaaggcaatcaatgtgactagaatatgaggcatctcattaatcatagcccagacagatttcaacattaacaaaatgcatcatctttaatttcatagttaccttccaatccaaatagaacaaaacatacaattaagtcatttaaaatagttggattaggtcattgcgttttctggtcaaaccctttcctttaaaagacaatggatttcttcacaggaaactccagttggcaggcctgcttttgaatactgcccactggtttttggatctttcctaaatattagaaaaatgcccaactctcctaaaatagtcatttatttttgaggtagtactcttagaaaataacatataagattttccactatttctaatcttaagctttcaacattttatcatggcatacttgctactggtttttttttaagctacacctaattggattaaggaagttcccttttatttctggttttttaacagtttcttttacatatagtttgaatctaatcattcatgttttctcatatcatcatatgattttctctttttgttactgtggtgaattgcacctattgatttttaaaatctttaaccgtttatatattattagaatgaaaccaatttgatgatgatatgattttatttctgtaaatcactgatttttaaagatattttgtttaagattttcaaatcagagagattggcctgtagtattccttacatatattgtccttgtcagatattggatcaagatgacgctggcctcatgaagaaagctgggaagttgatgactcttttctattctctgaaagtttatatatatgtatctttttctgttatttttttccttaactatttcataaaaattcaccaatagtgagatgttactatttgagaaagctggataaattgcacatagaattctgtaatttttttttacaatttcatatatgtctggaattaattcaaagtaagattttattttgaattcactaggggagcatccgagtctggagttgtctcctcacctccccagtaggtgaaatgtagattctatttctttaatatgtgtgggggtatttaaattttctctcttttctctgtcaattttagaaagttttgttttcctataaatattttttcttctatatttttatatttattaggataaagttgttcataatcctattttgttgtcttgtcaatgtctgcaggatccataatgatgcccctcttcatccctgattttattagttttttaaatgtcctttctctttaccagtctttccagttaggcatcattttatttttcctccctgaaaaccattttttggctttgttgatactttctattatatttttaaatttcatctatttcagtttcttccccccatttccttgattaaatttagttgttgctctttttctatattggctttaattactcttttttttctctaacatcttgtaatgggttcttggattaatttcaagtggttcctcttatttaataaatgaatataaatttcccttcaacaatgactttagctggatcctgcaagttttgttatgtaatgttgttattataattcagttcaaaatattttctaatttctattgtgattatttcttaaccccaggttgtttaaataacatttcttaatatttatgttgcagttaatttctagcttagttccactatagtaaatggacatactctatatggtgcattatttgaaatttgttgagacttgttttatgatccagggtttggcctatttggtgaattttcaatgtgtgtgggaaatcgtgcacatgtatcagttgttaacatagtattttatatttacaaatttggctgttaacttggcatgattaattgtgttgttcagagcttatgtacccttcctgaatcttggtccttatgttactctgaaagagaggtggtaaaatctccaaatatgattatggatttttctttctccataagatctgtcaatttttacactaattattttaatactatgaaattttatagctataagtttaaaattactatattatatcttcctggtgatgtcactaatcaccattaaatatctccccttatctcttctttttgccctgtttgatactagtgtgtctatactaactttattctagttaatgtttgtgtgatttacaaacatttttcagatgttttctttcaccctttctgcaatttttaaatttaaggtttctccttttacaagtaacattttaatatttatattagagtatttacaatattcatattgaatggaaaatctgatatatttgaatttcaacattttactatttgttttccaaattgtgtcccttatatttttcctttctcagttattcattcattatttgtatgccaataatattgaaaatgcaggcaaataaaaacaaagttaatgcaaaaataagacttaccaaaattgaattttaaaaaatccttcatgacagcggttgccctggggaaaaaaatggaaatctaaatagacctataaccattagagcaagcaaatcagttgtttaaaacaaaccacaaaaataaacaccagacccagagagtttacaaacaaatttaaactcacctgttttagaaaacagaaaatgaaagaatacacacaatttgttttatgaggttttaatgctcaaaccagaaattaaatatatgaggaaaaaatacaactcaatttacacttatgagcacaagtgcaaaattataatattttattagcaaaaagtatattaaattacattaattgtattattcaaattaaatattggataattattaatctaattatttaactatttaaaattaaataaaattttcatctattttaccactttcacactagcatatttaatattattcacaaattaagataaaattgtgatctcaatagattcacagaatgcatttaataaaatccaatacccaattgtcttagtttgtttgcactactatacaaaatacctcatcatttgtaatttataaagaatggaaatttatttgtcacagttctggaggatggaaagtccaagattaaggtgtcaagaggttctgtgcactgagggcccagtctctgtttcaaagatgtcactttgaaggctatatcctcacttggaagaagggaaggaagggcataaaatgacctcacccagttccctctagcccttttataagacactaattcattgatgagggcagagcaccttcatatcttagtcacttccctacaggtgccacctcttagtaccactacaatggggaataagtttcaacatgacatctggaaaagacacattcaaagcatagcaccagtctttattaaaaaacaaaaaagtcttttaacagataagttccatagcctggtaaaccataaacctgatcacaggtaatgataaaacactaaaaccatccaattgaaaatataaacaagataaagacatgtgctatcatcattactatcaaatcttgtctgaagatcccaggcaagcagaaaagagagagagagagaaaaatgaaagataaaaggattgaagaagaagaagcaaaactctccgttattcacagacaatgaaccacagtgtgattgtggacatctaagaagtctgtgatctaagaagtcactaatgaaaaatgtgtatcttgaatgatctttgggaatttctgacagatccaacaatttgacaggttttctccagtagcagtattctgagacagtttgtttacagtattattgtgctattctaaacattgcagtaatggaaataggaacaaaagggtgattaaagctttaagagtaaaggaagatattctgaaaatgcaaggacgtgtaaatgaaagggacatctctcaccatgtaatacagcagcttcccctgtcaccttctgccatgaatataagctttctgaagccctcaccagaagcagatgccagctctatgcttcatgtacagactgcagaaccatgggacaaggtaaaacttcccttctttataaattacccagtctcaagtattcctttatagcaatgcaaagcagcctaacacaaaggccttgtatccctcttctgccaggaaatttaaagtcaatatagtgttctggtcagagtctgtcttagtagtgcaggctattactatgtcatcaacatactgtaacaaagtctcatcttttaattggaggtctcacaggtccttggcaagtatttccccaaagatagttggagagttttcgaaaccttggtgaagcactgtccaataaaacagctgttaggctttagaacatggtattgttattccaaggcaagcagttattgggactctggattcaggggaatacagaaaaagacatcttttagctctaaggctgaaaaccagccaaacttaccaggcaatgtcatgagtagtgtgtaaggattggggaccgctggatggatgtcttccataatctgcttattggccctcaaatcctgtataaatgtatattatttaagtccaggcttctatagtggcagaataggcatattgcacaggatctgacagggtctaatgcgctcatattgtaagaaggcaaacaataaaggctaaatgccccactgtgcctgttctcccttagtgtactgttttaggtttttcactgttactctagcataaccttgactcacactgggagtgtggttttcactttccctggcctcatctgcccaagtttctggactcacctcttaaagcagtgtccccaacatttttggcaccagggactggtttcatggaagacaatttttccacagatagtggtggggaatgggggtggtggtgatggttttgggatgaaattgttccacctcagatcatcaggcattggttagattctcataaggagcacacaacctcgattccttgcatgcacagttcacaatagagtttgcactcctgtgtgaatctaatgctgccactgttctgacaggaggcagagctcaggtggtaatgctcacatcttgctgtgtggcctggttcctaacaggccatggactggtactggtccatggcccagaggttggggacccctgtcttatacctcttcctgtgtgggggcattttcaataacttctctttgcaagaaggcaacctgaagaacacaggctttttctgggggcccctgaatgttcatccaatgcagagaaaaggtaacttaagcatttaatttggccaggaagtcttgtcccaacaaacaaataggacattcaggcatgtataggaaaccagcttttaaatgagtttgtcctagttgaaagcacaaagttcggagaagtaatcttggcagtatctttccaaagaccccagccacttttataaactcaaaagaaaatttagacaactgagtgttcaatactgaataagcagtaccggcatctacataatacttcaaaaactcatttcctattgtcattgctacccaaggctccatatgggaaatacagaaggtatggtttgggtcaggagaaagacctcagccccattcttcctgatctgcttcaagccctttagacatctggggaattaggtgaactgaaggctaacttttcccagcactgggcttttgaggcatgagtaatcttttttccagtcatctttccgttttgaataggcacactgtttgggacctgcagtaagacaaccatttttattgatagtttggggccaaggtggtcctaccttagatgatgtgcttgcaggggtccctatcatggtctagggactccttgagtcaaagcctcagccaacaagtcagctgtttgtacatttttcgtttttatttccatttcttcacctggatcagtaaatacattgaaagcaatatccaccaactaagacaaagacattcataaaagcctgtccacctttttcagctttttccaagaatttgtggcactttgactaacaaacctcatgtatgccatttttaaattgtctggggcttctggatcaatatccatgtattgtccaaactcttcaaaaccccactgtaagaactctgagaaactgtcattaggttgctctctaaattcctggtccttactgaggtttctttggttgggcacccccttccacagaccagccaaaatgcaatcccaatcatgttccagcttaggtctatctgcagtgtttacattcaatcctggataaagggcgggcactgcaacttaggcagctgttcttaccagattgccgggtgagtcagcatgcagtcaataagtttcctcctgagctttatctaaacccattctctgattctctaaggttaaaaatatgtttaaaaaattttagacatttgtccatgtggggatatgagtaccaaatattgaggagaacagattctctatccactttgcatcttgctgacaggtgggcatgttgtttttccaattaaacaagtcagaggtagaaaatggagagtggacccaaacaaatcccataggttggcctgtaagcagcatcaaactcttttatgagtagctgtaaggggaattgtcctcccagagccaaaatggcatcctgattgaattgagttccctgtcaggaatgagagggaaagaccacttttgttgctcctaactcctgaactctgtagggtgaggactccagcttaggggccagcagagcagctgcagcttccacataaggtgatgacgctgtgagaacagtatgcttatttagttgaaccaccaacgtatcattatcttttttcttgtcagtcagccaaacaggtattttcctttgctgaacaatgattttgcatttcttttccattggtttattttgccaaagcagaataaaatattatacataagggatctcttcccatttctctttcctcttgcagtaaactgcaggatagtactgtaatcgagggagccttttaatgaccactgcttacctgaatccagcatgtattgtggccaggcagtattacaaaagaaaatcaactttttgtttgtttgtttcatgcacttatagacaaaaccttctgaattttgcaggttgcagcccaaaagactgcttcagagaaccaaatcaacatttcccattccagccaagatgcgcacacaccaaaacacaggcactagtcactctgctcactgccgaagtttgacgtggtgaggctgacacttgttcctgttggtctctagcaccactgatgcactcaaggcggggaggaatgagctccactggaagttcagtaggtggtccccaggaaggatggaagagcagatggtcactctgagttaggctagtggagcttccagtagcaattccttcagggctcaccaaatgttactagccatacaaaaaaagatagttccctgaattaggcctgctgagcttctgctagtaattccttcaggggatttcctccatggccgtaagtatgcataataagacaaagataaataacaaggccttccaaaatcaagttctaaatttcagaaatttcacccaagtaatgccctttattctctttccaagtgaatagaaatcccctcaaacaaggtccttcttatttctagggaggtttggcaagaccttgaaagaggcaagaagacctctaagaaggccacaaaaccttcaaggaggccataagacttccaaggaagcaacaagaccttctgagaggccacaagaactccaaggaggtcacaagatctgtcaataggcaagacatcagagatagccgctagttcggtggaactgagtggccacttggcttgtctctgggtccatcccagtggaaagggggcactgagccaaatgtccacaaggggctcttgaatagctcttataacaaaatttgttatagggccaacatgtttatatgcccactgcacagtaacagaccaattacactgaggcagcagggatgcagcagagaaagaatttaattattgtagggtgccaagtgaagaggtggaaggataacatcaaatccatctccccagggagttctgagctggcattttcaaggagattgtggaagatgagaggctgaaaaattgggatcattgattggccagggcaaacaggatgaaatcatcagaatgtggaaactgcattctttggtgagtcagcttctcacaaggttcttcagcccaactggcatcagtggggtccttcagaccagctgagtcagtagtttcatcaggacctgaaggaatatctcaaagagaaaacttaatgtctcataatgttcaggttgttatctatagaccagttacggggaactataatccagggtccatgtgattccaggacagtcagcaccaaacaactccaaggatgcaggtcagagagcaggctgacctaatgatgaatgctggacatggtgcaagcttggtttatttttgtttcttccttctcttcttccctgattaattttataaactttatccaggtggtttcaacacttggatccagtaaacaaggatattaaagagatgaggtatgcagtcacaaagaaagataaataggccagtggaaaatacgagaatcctggtcctgaaacaaacactggtagcttaatattggacagaaatggcatgaaagatagtaaacaaaggatggtttatgtagtaaatcacaaaaggacaactggccttacatttggagaaagaataaagcaaatgagcaaaaagcctggagttgtggatcatccgtctaatcccaacactttggaaggctgaggtgggttgatcttaagctcaggggtttgagaccagcttggacaacatagtgagacttcatctctactaaaataaacaaataaattaattagttaattaatagctgagcatcatggtgcatgcctgtagtcccagctgctcaggggcctgaggcaggaggattgcttgagcctggaagttggaggcttcactgacttatgatatgccattgcactcctatctggaagacagaaggagaccctgtctcaaaaaaacaaaacagaacagaacaataaacatttactggatttcaagaggagaccaatctttacttttacatgtaaaagtgatgaaatacattattaaggaaaacattgatagattttgctataaaaatgttacaaattctctaggttaaaaacatgtaaaccaaattgaaaagaaacaagctggaaaacctaggtacatgcagttaatgaagtttttactaaaaagaaaaagcattcaaactattctggagagtgtaccaagacccaaagcagtaaatttacagaaacaaaatttaaatgagtaatgcacataataaaatatactatgtcccttaaaaaaacaccgcatattctcacgcataggtgggaattgaacaatgagatcacatggacacaggaaggggaatatcacactctggggactgtggtggggtcgggggaggggggagggatagcactgggagatatacctaatgctagatgacacgttagtgggtgcagcgcaccagcatggcacatgtatacatatgtaactaacctgcacaatgtgcacatgtaccctaaaacttaaagtataataaaaaaaaatacatgacataaatattatgtcataaatgcttctatatttgttataatgaaagcttcttgatacagaatatgctctatattagtccattttcacactgctataaagaactatctgggactaggtaacttaaaaaggaaagagtttacgttgactcacggttcaatatggctagggaagcctcaggaaacttacaaccatgatggaaggcaaaggggaagcaaggcaccttcttcataaggtggcaggaagaatgaatggaggaactaccaaacacttataataccatccaatctcatgagaactcactcactatcatgagaataacataggggaaacctctatgatccaaatacctccatctggtctctcccttgacacctggggattatacggattataattcaagatgagatttgggtagggaaacaaagcccaaccatatcatgctcttaattataattttttcactgcatcttcctttcataatattgtttcaaggaaaactatattttgagtttccagaaatgggaaggtgtggccagaagaggcacagggttttaatgacttacagattagagaagaggaaaatcactggaggagacaatgaaatttaaaatttttctttgaaagaaagggttttttggtgcatcttcaacagaaaatgcaactactcttgtcaatcactttatacatgttctaaattgtacaaacagacaaggacaatgccacttactcccgagattgtatgtatctagcagataggtagctaaggcggtgagacataacaagatctgagcaagcaaagatattttcttgcacagattcttgacctagaacattatccagagcatgtaatccctgactgggaagctggcgtggagtagagcttggagaatttcttggttccagagtgggtcacagccaagtgttaccaagaaattgtatttttatttagttatagacccacaagtcacttgtattctttacattgctaatcaaatccaaagcagccaagatcgtgcaccaggacagaagtaaacaatggcctgtcacctaaggagctggaaatgatgccccattcaagagaaactttcacaacccacctctaattcaccaatgatcaggataactcatgctctattcttcctctataaagcacattgactgatgaacacatgtgctttctaagccacactataatgtccatgaacttctgttcttacctgtctggttatttgcttaccaagaatctgtgttgtttgttcccaaattcaactaggtcagttcttatgctgtgatcgggtaactgaattcaatgttatatccaactgaaaaggaatcatggcatgctaattaccctgatctgatcactatacattatacatatggaaatatcaatatgtgccccatgaatagtccacttaaataaataattaattaaaaattaaaatgaatgggaatgatgcaattaaatcaagatattaaaaatattgttgaagatgaggctggtgggaaatgttataaaaatctaaaagtgctgtgcagaaagattactctccaagtatttttaagggctcatttctcttcaatcaaactgcaaatgttaatcatggatcccacatttcaaatgtggtttgtgctaaacgatgatgtggaatgctaacaggaaaatctatcttcagagaaagcacttaggccctaccatgataaactgacaaatcagtatttattagaatttttttaagttaaaataaaatgtgtatgataagccttttgcaacacctaatgaaacaacagatcttggcaatgatggatgtatgctacaaacactagaaacgtggcaattaaatttaaattaaataaaaattttagttcctcagtctaactagccatattccacatgctcaatagctacatgtggctcagtggctaccatcttagagtagatatggagtgtttccattttcaaaaaaagttccattggacacaccattctagaaccagcagtttggaaatgacagcatgttaaacaacatcttagagaaacaatcagcgaagtccagaacactggaaattttacaggaaaaactacacagttgatttaacaaatgaatgacattaaaacgtacgggagctgcatacattaaaaaaatttaataagcagtgaatctaaacacaatataaagaccttatttaaatcttaatttagcaaactaaatgtaaagtgacatctctgacacaattgagaaaatttaaacatggactaggcattaaaagatctcaaagaattatcattaatttctaggtgtgaaaaagatattctggctgtgctttttgtttttaattttaattttctgttaaagacacatgcagatacagaaatataaaagattatacataaaatgataagatatttgagacatgctttaaaatattacaggcagaaggaaaagtgtgcatgtgaatgcatttatgtgtagatggatgaaatgagaatggtgaaatacctataattgtggaatccatgttgctctctctaccttgagatatgtttgaatatttccatattatacaattcaaaatgcacacagtatgtatatatatttgcatctgtgtgagtccatctgttataactgattttttaattcactatcaaactactaggtcatataagaaggaatccagtgtataaccccctttcctgaatgctgatctccaaggcaaggcccagtgaggagagtttatggattctcctgcctgagcaaattgtctccagtctctttaccaacctccagccaacaaagggcatgtgttggacattggccaccttaacttcatttcaatgtgacaaagtttgttacaaacaagattgatttgaatgtggctgttaataaatcacaggctgccaataattacttttgatacttccagatttttttgaaactctatttctgcttttgatgtcatttagtgtaggtagaagctctatttgaattcttcttgcacttcaaattctgatagacttatacattttaatgtagaggagttaagctacccattcatttaagaaaatgatccatttggtctctctaatacccacaaataattaccattagaaaactataacaatgaaatcacagagttagaataacaccatgcaaatcccaaagaactgaggtattaatatgagaaataaatagctacaatctgaaataataaatcaataagataaacgaactatatcacctgtatacaatatgtcttaataaataatgttattggaaagaaaatgtattggctgtccagagatgggactttaagctcttctcttccatatctttgatctttgtcaaagcaatttacttccttttgattccatttctttatctccaaaattagcaatgtcatatgggagactgggatggggatatttttaagtataatttttatatgcagaaaagattattcagaggctcattttgcattcaaccaagtaatactgaatttactaatacgaaaacttcaagaatctagtttataagttattttgtgtttagcttgaaaatcctattctctagcagtgtttaaaagtgattgcttttaaaggacctttaaataatagtttttataaataaatgtattaaaatatcttaagcattttaactacattttaaatatttagttatttaatttttacatatttcagttaacctctaatttatataaattttataaattaaattaaaattttggtgaaacattgatactcttaaatattccaattctataaacaaaaaatttaaatgattgttcaattataaattttaaaactggacttcttctgtgctctactaggttaaatactcttaaatattagaaaattataaaatactaacctaacacagatttcttaatgagataatattaatattatggttttaaatttcctaaacacttccctaattttctaaatctcattgaggttaaaagttacctactaaatgaggaagagtgtccccatcccagttaaatgacactgtttcccatcaaagatttaaaccaagtatagtatttggaattacataaactattatattatgccatataattttggttgatgcctctccagtattgtttagggtaataaggacatggagtttttgttcaacaagttggccggattcttactgtagacatgaatggatgctctaaactcagtctatagttgctatataaattaacccacaattacatgaaggagtggccactagtccaataaatttctggattcacaatatataacaaagtctgcaacttcaacatgaggtgatctcatttaaattttgccatttctttgcctcttaaggagtatacatgtcttctccctgggcataaagagctctaaacatggtgaaatccaacagttctatcacaccttattcttgggactgcacaaccattatagattttaagttacatcttattaaactctaaatgtctgtaaggactttatttgacaattcaatgataatttacatggttattccactaacaagagtatagactcatcactaatctgaagttaaataaagttgtactatatctagatcttctagaatgaatatatttctgctatgtgaccttaacagtgctgcccacttgaatttatttgggtgcagatagtcattagtatgatgacatctataggtatttctctaagtaagctctgaaatcctcccactgaaataccaatatgtcagccaaattctcaatctgcctgccgcactcaacaattgtaccctgggcacagacttaaatattgaggaatctaaatgcaatgattataatgactctttttagtatcctctgtttagagttcacgtttggaaaattagggtacctttaagtattctgacaatggtacattatctccagaccttagagggagagacatatcttcgttttcttggttatacaataacatatttttaaaataatttttaaaaggaaattaatgtagcatatatgtttatgcaaacagcattatttttaaatatgcttataaaaacatatggagatttttgagaagcaggggtcatctggtcccaccttctcttctaaaactgggaaggcatgttgcctcccaagcaagcagactctgagcttgacttcagtgtttctgtaggaagaaaatgtggttcatctctgtggctgtttctgagaacggaggtgctgagtgtttgaggagctgaaagaacaggtcacgctggaaccaaactaaatacaaaccttaaaacaatgagcctctgtctgaatgcaggtcttctggctcccagagtgacaccttagccaacccatgttctgtgactgtcctgagttgcagggctgaggcaaggaaatcatatccacactcacagttctctagttcattctctctctctctctctgtctcaccctgtctctctctctctctctctctctctctctctctctctgtctccttctctctctcttcccactagaatatacacaagaaaccgatactcttaacactggattatgactgggagtcaagacatgacccctgaccttgcacaccaggtagcttgagctttgttgtttttcatccttatactagaagatttcccttgtcaagatttccatttctttcccttgtcaagatttccatttctttcccttgttgggagaaattatccacaatgtacgagcaggtaaatggattattgcatgttcattgtttaccagcccacccaaggattatttcattctctaggccaggagtcaagacacttttcctgcaaagggtcatatggtacacattttaggctctgagaaccatatattctgtcatgagtattcagctctacctttgtagcacaaaatcagccataggaaacaaacaaatgggtgtagctttgtcccaaaggaactttatttagaaaaccaagtggccagtggattttggtctactgtaatttgtcaacatttgctctcctctaggaaaataaaccttacttgatttgctatttgtacttgatcagggcccagcctctgtgagtttaccagttaccttaattaaaatattgatcctatagaagtgcaaattactttttttctgattgaattgacagtcccaaaggttatgattttattgcctaatagctctttaaactgttttgtctctaacttcaaaagtaaaattttattttaatatgtctttcctgatagactatatacactcttaatcctcaaaggccctttgaaccaggtatgtcatatttctggatgagttatataagtgaactattgttaatttatactagttcactagtataaactagtgaactagttaataagaactgcactatatcctatatttatataagaatcatagttttatctttctgacaactaaatattaacaatctggatttgaggcaaacacaccagcattctatacatgataccaagaacaaatatcacaagcacctaggagggaaaaaggcaggcatgtcgtgtgaagcccctcccttctcttaccagataagctcatgagttttctatgagatgacattggtcttttctagattcctgatgccaactcctgggaattcctatgtctttagaaacagtggctagaaaaacacagtttcacagaggtaaaatgaggcaattcatcaataaaaatgaggtaattcactaatataaagctctgaggtatttatttttcagctctgctattttacagtaactactgcttgtagcaaagataattcctcaaaatcctttccttttatgcactccattcacatataggagagttcgttgaagtgaaggaatgatgggctcaattaagaaaagggacatatgccagtcatctgaaatctttctagtttgaaacagaaaataacgttattttgatgattgctttaaaaatgagaagaaatttaatataaaaattaactctgaattagccctgagttttacacaccatcaaggtcagattaattttagggagcattccaaagctgcactagtacactgctatcctttctcaagtgtgtaacttcaaaagctcacttctggttcatgctatgtctcaagcatcatttctacagagataacttcccaactctatttctaggctacattattcttccaggcatcagtcttccgtttgcagaagactgaccatctctcttttcctccaagcttattcttcttcctgtcttgtccatactatggtactcccatcagatggccttctttgctcaaaacctttaaaacttatttgacatttcccttcaccttaccaccatccctaacatccattcagcagctggatcccatcagtgctcctccaccctcacccacagttcactagcacaggttaccttagcttcactttctttcagctgctcaatgcctggtcggctcctttctcagagccccactcactccattaatagaacaggcagacacagactactttttttttaacacacatttcctggtgcttccattccttaccccaatcaaaaaatgttgactgtttcttattactaggcaagtaaaatacaaatccaagaccctacctgacctccataccaatattgccatcactgattcatttcaactgctcctaagtccttgttcactcctttctgcctccctgaaatatattttactgcagccttcccttgcactactatgtttttacaggtcccaaccttgtctaaaggtctttccaattaccccaaataacatttgcctcctgcaacatccatcatctttcactggttctctcccacattcttaaacttcttaagaatgggtaggcatgaatgtgtatggtaataaaatgacagttttcagtttgcaccccagcactgacatttgtcacctctgtgacttttaccaactgactacatgtctctgtgcctcaatttttctattatctgtaaaaacaggacaaaagccttcacctctccagactcatgtagatataaatgagtgaaactgatccacaacaaatatcatttatgtggatcttataacactacgtcttgaatatctgagtttgccttttggttaaacttatttcatagagacctggagaaggattccttgtggttgtccaacattcttcttttggtaacagccttctggagaattatttcctctcattaggtccaagctggtgaagctgtaaatcaaggtgcctggccttccttgccaactttgtggacacattgcttaagctggacatattggactttctgtcctgggactttgtactgtgagctgagtaatgaaaagttgaaaaaaaaaattgggatatctgtattccaacattttagtcccaacaactcagttgcacagttgctcttactgagattactagaatgcctggttctatcctttctagtgtttcttttcattcccttcatgctcatgtcttcccacacagtcccccaacccctcctataattttttttctgcttgagttagtgaaatttaattccgttgcttacaaccaaagaaccctaaccaagtatgtcatctaccaaaatggagacagccaaagcccaatgtctagcacttaaaattctcagtaaatctttgtgatataaaaaaaaattattgtccgggcgcagtggctcacgcctgtaatcccagcactttgggaagctgaggcaggcagatcacgaggtcaggagatcgagaccatcctggctaacgtggtgaaaccccgtctctactaaaaataaaaaaaaattagctgggcatggtggcgggtgcctgtagtcccaactactcgagaggctgaggtaggagaatggcgtgaacctaggaggcggaggttgcagtgagccaagatcacaccactgcactccagcctgggcaacagagtgagactccgtctcaaaaaaaaaaaattattaaacctccatctgccttgttgatatacactgtagtttaagttcattctcttaattccattaggaatcagaattctttcatgttttatttgcttccactctaaaaaatatttatgctcatcttgttccaaaaataagatgatgtaattgacatttacatagaaaattgaaacaatgaaggaaaagttaaaatgaagggttttttttccaaaaagagttataaaacaaatttaaaagtccataatcctgatcatcggattaatttgtttcaaacacttcatttctggtctgctattctactctggttttcccttagactcacttgggaagatttttttttttaaatacatgtgactagctctcactaaagaccagttttatctgaagatctaggtgtaggacctgggatgcaaacattttcaaatgtatcgggtaaattctgatgcacaataaaggttgagagcttgagacttagggatccaatcaatcatgcaagatgcttaaaatggaacgttgatcttcacatgatacttgtcaaatgtagaaaattttgtctggatttggaaacaaaaatgtgagcatgaagcttcggtaaaataaactctcttgaaaaacactaatactctacaattatttttccatcaaaataaaatagtgccaagtacatagcttcttccaagtaacaaatctttaaaaccaaagtgaaattttgaaaccactccttcaaatagcatccgtccggtagacagatggcatgttttatttcatttcccgtttctacttggtggagttcatggggtattttgagaatcaatgggtaattaagaattgggtgccaatttaggtatttgatttggaaattgagtctttgaaaaccatcaattccaaatatagcgcaagccctccttattatgctatcccagaaactggtaataagaacactctaaaaatatttagaaatgcaggagccagattttctgggctgcaggtggaggacacacagctgccaggaaatggaagacacctgctatgtccctgagcccccctttggcgggtagtggatggaggacaataaggtctgctgtagtattaatctgggtactaaatagtaataaataaatgtgatttaagagcattgttgggagacctttctgaaagagcatgcacagtagtccttggtagtaaggaatcaaggctggtagccctaagccatttttgttaaatgtaaagagtgctgaaaaagtttcacacctgcaactaccagtcagtagcaccttaggagacattacttcatcagacacgattaactccttgttctagagagttcagcagaagtctatagaaatttacagtctatgtgacattgtgctaggctgacaggcatcaacctgagactgaggtgtgaaaaaagatcacttgaaaatcttattaaaaggcagatctctgaggctcagcttcacatattctgatttacaaaaattgtagaggaatcaggaacctgcactttatcaagcattccaggggtacttttggtacaagtggtctgtaggcaacacttggggaaaccaataatgattaatatcatgcttccattaaggaaagttaattttagggaaaaaagagtatttgaaaacctgagtaaagaaggatctggcaggggtttctggctcaagtaagaaagcctcaaagaacagggagtgataggtaagtccagattgcaagatattccagaaagaaggggagaaccaaagggaggagaggtgagcagttgctaggaacaaacctcagaattacaaaacttttcctaagatctattctggggaggagaacagtttgagaagtaaaagaccataaggaaatatcggatcatccaacattgaccaaatgttactaccagtcagcattgcaccaggtgctttagaaatatcaccatcactaataggtagctgcagcctataggttaggtgcgtggactctaggggcagtggttgctcacgtatgctggttatatctgaagtcacctgggagctttgataaatgctgatgccaaagctccatgtagagagtttctggtataattggtctggaggataacctgagcctttgtgttttttcaatgctcctggaaagtgttgaaaactaatgctctagagcagcacttctcaaactttagggtgtaccagaaccacctggagacctaatagagaacacaggcccaggcttcttgaggtggaacagggcctgccctcttgtgttgaccaagtgccccaggtgattctgatacctgccaattttgataaacactgatcttgagggagactgtgtaggtttgaattggacttcaccaccatcaactagataccctggggcaagttacatacaccatgggcttcactttccacacctgttaagccatgatagtaggacaaccctgatgagggatgaatgtgaatggccctggagactctttcttctcactttctggtgagcttagtggagagcggtctcagcagctcagttatctcaatagaagaacaggctgataccagcttcagccccttctacccacctctcacatagccacttaccccagaagaaagcgtccattgtttcgtaatctcatagatgttccctgcatattctctcccaaccctgactcccaccacaattgtgtacaatcataatttttcaaacttcagtgtgcattgaaccacttggaagacttgataaaacacagatttctggccccaatcccagagtttcagtctgtcggtctgaatatggcccgataatttgcatatctaacaagttttcaagtaatgctgatgctaatccaaggtataccttgaaaaccattgaagtagaacacactgaggacagggctcctctctgcagaaccattggccatgcttaagcagtaggataatgaaaatctgaggattgcgcaaactgtgccacttctctgatttctcctataatctcttttatgtttgcactgcagaatgctaatggtatgtgtgtccatcactgtagtggggatttcccatgttatcacctgtaaaattgtttagaaatgaatctaacaaatagtctgggcccttaaatgaaagacaacattatttttaatttgtcaaactcatcttatgcacctgctatgtgctggatatttggctagatgctgcaactactatgatgaatgaaacacattccttatataataagaattgatagtccaaaagaaaataaaagcaagttcacaaataattataatgctataaaacacacaacaatataaaaaaatctctggtgtgggaaggctcccattaagttagttatcattagggaaatgcaaaagccatgatctactagtatttttgctatcacccaactcccacaggaaatgtaaaaatccatcccctcccctccccattctccctacccctgacttccagtacccactgcagagatgtgatgcacttgtatagtattcgactgtattctattcatcaaagataaacatagtggagaaaatagcattagtgaaatatccattagatgtggtttcatcctaaattatttctgcccatactcgagatgcttgaagttttaatcattttattatcatttggtatttacatagaatcttttctcaaaaaaccaccaccactttttcaagtattatcttcaaatgtcacattcctgagcaattaaaaagagtcactggcgtcctcattttggtgaaggagtcaagagatggagagacattaagcagttcaccctagaacaggggccaggaaccagaacttctgaatcagaggaataggactccaccttctgctgtgtcgtaagaagcgaaagatttatactcacctaggggcactcctcactcattaaccccctccacaaacaacctgagagtgcccaaagggacaactgtttggagcataaaataataataataacaaataaaccagaggcaaggtattattttttcagaaatcatgacatcattggagagaggcatattgttctttttacaggatcatcacaaacagactactttaaatggagatacaaatatccacgttcattcatgggatacagcagcttctactacctgactcctgctccttccaagaagtgtttatccttacgcaatgggcttcaacaatgtttaataaacggtctgggctagaccacccagctgctggtaagaggacagaaactagcattcccaaggcccatgtttttctatgctgacaaggttgggaaagaattagtactctatgttaaaatatcgggacttttttcatttaaaataaattgcagccagagtcttacaacagaaatgttagtaagtctagagcaattggacgggcaaatggttgggttttctctcaaatactttgctatagcagctatctactagaaaaactacttaatcagaagtaaaaataaggcccaggtcagccaccgtccttctagaacttccagggaaatccaactctctcagttcccagtttatcaaaaaagcagccaaaacatcagcttttcagccctgccacctagtatattttctttcaaatgtgttcatttccaggaaatcctacaaatatttaaaatttgaggtcactttggaataacattttctagatgctgatggaaaacacatcggagttgatttgaaccatatcaacttctacactgagtcagaacatcttcactttgagatacacttgtaaaacccaaaagcgagagtcactgggaagcttggatagggagtagaataaaagcctaatatttggggaagtccagtagtattaagctaagattatcatcagatttttctatctcgtggtcatcccatatttgaaggaattatattagcataatttctggatttctacactaactccaactcaactaaataactgaaaataagaagttatacctctgaagcccagcacaatcacaggcagtcaatatctgcttatgtaaataatcccatcactaccatttttatgattatataacttacaaacattcacataatgcctatgaggatctctggccagagaaaaatctgtacccaggtaaattatggctgaatttccaacagggaaaactgataaagtccactgtcttgtctccttggatcttcatcattaatataaccactgctagacccagaaaagagaaaatctcaaggcgtttgacattggatcgttttgatcaacatcctgactagatctctgatattcacaaaagactgaagttatccagcaaaaggcagggcaatggcattctgtttccctcatcagcctacatcactcagagctttagtagagttagctatggccattgggggtggaggcattatgggagagaaaggaaagcaagttggacattcagagtcttaggaaattatgctgctgttgtgacagagatgtcagactgctttgctgtgcaaaatcttagcaggatttattgcttgtggcttcctggcaatgataactttccaagattatctcagcaaaatacatttctgaataaagctcttgtaaattacaaaataatttcttctttcacacttgttcaaaactttctcttcaccttaataggagatgttatgagggtgagaatcaacatacctttagtttagcaaattttcatcttaattcagggaggttgtagttggaggttgtatagcagatgcatgtgacagcaataactacttaagcataccctgagaatgagactatggtctgagaagaatgtgcatttggagttcaagctaaggaatccaggaatggccaatccagagtttcattccttatctatgaggaacatctaaatccctagcccatcccatggaatgcaggccgtacaggggattgagccctttgttttggattacatgaaggtttccagctggaggctgttagggggagggtgctaagtgaaaatgctatataaactgcatgctttttagaaatggtagttctctcttgtccagcccaccaccactggactatgttatatgtaaagtcctcacaataaaccctgtcttctttgctagctctgggtttcttcttcagcctctcaaacatggttccatccctactgaagccaagaggggtccagaacaacaaaggtcttcacctctttgtaaacatgctttgccattttgtgactttagtatcaactcattagcagagaatggacctttctgcacatcttgactttcagagtatctatggtccccatcctaccatgctctacaaataaatagcacctccaaagccagagggttatgggaaagcaaaacaatctaatacaaaggaaacacaggttcttattgcttgagtcttggtttaaatgaggaatgtgaggataagagaagcctatagcatgttctcaccttgaagaacaagtcattaaaaatacagacagagtagcactcccgccagactctctgtacctagcaggatccagaattgattttcctttctaactcaagctcctcattaagccaataggctcattttacaatatttgtttcatacatgcgactgaatgagccacttctattttctcaacggaagagttttctatgaaactgtaacaagaggagccacttttaacaatcaatggtccctttactttctggaggcgcagtatattcttaattagactcagataaagaaaggaactatatcaaagacctatctcaaaatgcaaaacgatagcttccagctcattctatccagttgccaaaattgagtaaacctaggatgctatttctttggattgtgttaaataaatgattctcaaccttggccacacaccagaatcatctcaggatacttgaaaatttccattgctcacaccacctcagatcatttaagtagaattcctgggggtcatccactggtaacccccaggagtcctatttaaatgcacaaccaggatgaaaaagtaacgtattaaaccagtggttctcaaactttaatatacatgagaactacctggaggacatgttaaaatacagactgctgggtcccagccccacagtttccagttctgtaggtcttgtggggagccccaagatttgtatttccaacgagttcccaagtgatgctgagctgaggcttttaacacggggaacatactttgagaaccaatgtcttacatgaatatgttgatctgagcattttagacagggaaataaaacattttacatatttacattttagagcaattggtataatacaactagccattttaacagcattatataatctttaatttgacaaactaatggaaataccagtgacagtgccaaagaccaagacttaatggcttcacttccctcgtagttatacaagaaacccaactcataaaatataaccgagatgtttaaacaaaccacttatgtggtacttaggtgaaattgtaactcttttaaaatgctatagattatcatcaatttcatgatgtatctgctttatttcattcagttcacttgaaaatttgaacagctggaacatcagagaaagagaactgcataatcacaccttgattagcaagacggcaataattcaaaatacttatctagttcataatatttatctcatttcttaggaaagagctttcttccaaatcttcaaaaacactcaacatttctgccctccataccagctaatacacatcacactcactccctcatatgataatcacacattttggtatcattgtatcaaatccatttcttccttttggggttttaatttttgctacctgggtatgtatataccaacgctcttataaaatacttttttcaaacttgtatatggatgtttatttcaggttcctgcatagtggaaaaaaactgaaaataacataaatgttcatcaacaatagagtgataaacggtggcacattcatataatgaagtattataaaacaattaattaatgtgtcacataacaacatgacaaatcttgtagacgtactgttgagtcaaataagccatatataaaagagttcatgctttatgttttcatttatacaaagtccaagaacaaatatagataatttaaagccttaaaatttagatgagtggttgtgtttgaggggagtattgacagaaaggaagcatgacagagccttctgtgatgctggaaaagtctacatcttaatctgggtggtaagtggatgcctatgtatgtaaatatcaactaagcttatgagttacagttatgatacactttctgttataatgtaattaaccattttaatttcaaaattgcattaatatgacaaattgctctttgtgaaatattcctcaaacccaaatgtgaaagctgcccacatgttggaatgtgataattgttcatgacaagactaatataaaaagtatcccaaaagtcttgctcataaaatcaaatgtgaaaggtttccatctgaagatgatttattttctcttaaagcccccctaaaataagagtaaggtataaaatgctatcagtcaagggcaaagagaacagaagaagagagtcttcatcaacagataaaagatttcaacaagttttgaagggagaaaatagatgaaggatgataactgagttggcagatgcagaggagatagggaaaatgggagggataattttaccagaagatccctagaaaggggtggcactcagagataccagtatggtggttaaagtagacagaagagtcaagatgtagggttcaacaataagttggttactaatgaaagtctgtatataagatgatggaaaccagatttctagctcccatgcaagtggtaaaaaatttattctctaacgaaactcagtggcttcaataaaaaatattgtttgcatactagcatgagtgccctagctaaatgatctgctcactgtccaaataatcactcgaatgcaatcccaccagcctaaaagcccaccaaagcatgcaaagttgccagtaagttttagggtctcactcttaatgtgaaacaggcaaacaaggaccaccagacactggaatatgctcccaacttaaaaaagagagaccaaaataagcaggaaaaaaaaatagacattttagggagtccagaaaacataaagcaaaactttataaaaaatgttagttggttggcacagtgaagaataagaaattgttatattcataaaacaagaagagtatttttttaaataatggaagataaataatttttagaaatttagaatataattaccaaaatcactcatccaaaagtagctcaagaaggtaaatatcaactaagcttatgagttacagtggtgagtacactttctgttatactgtaattaaccattttaatttcaaaattgcattaatatgacaaattgctctttgtgaaatagtcctcaagcccaaatgtgaaagctgcccacatgcatcttattaacttattaaaatatagaaaaaagagagcagaaacaaaaaatatgagataaatagtaagagatttaggaaattaatataagaagtggacatttcagatggagagaaaaaggaaaagtgagaaagggaaagtattttaaaaatcatgtgagaaatattaccagaggtaaaggacatacatttctaagtggcaaaatccaataaaggataataaaataaaaagatcacaccaatgcatatcaacatgaagtttaaaaaaaaaacagcattagatgagtttattaaaggataaagtgaggatgtctatgaacctgttcccctacaaaaacaatgaaaattctgacaaatcaagtaaaaccaataatttcagaactcttgaaattaaacaaaaccaccaacaaacaaaatttcttatctaaaaggaatgactaaatctcagtaagacctcagactgtgtggcatttaacttgccaccacactctctctcaaccgcgcagtggcacagtagccacgaaaagccagaagcctcacagaaaaagaggactggcatcttttggagctcttttaaaagacccatcctcaaagcactgtcaatattttgtccaaagtagtaatttcccagaaaaatctctatttccaggttggtgtggctattttacttcactcagaccacaactcagcaaagaaaagccctatctttggagattagtggaaagaatcacaatctgctagcaacattgtagatgcctaaagctgtgattccatttaggaaaagctagatcctggctacaaatcgaaaaggaagtctgaagaacttgaggaccagagggaattttgaaaagctccaacatattcctggggatttggaagagcttttgcatacccagtactgtgtatagttaaaaacctggggaagtataagacctcagtcattcacctctggctgaccttgaggactcccacaagcaggaagtgaaacctacagttgtcttataaacatccctttagcaaacggtaaaagacctaaaggtaaagcatttatgaaaatcttttgaccaattacttgcttcttactaaattatattgaccaagtggtaactcctaggaagccaagcctaaaaaataaaaatagaaaccaaaacttaaaaaaaaaataagctagcaattaagctacattaatttaaatttaagctaaattacattaaattaagcagaccaaaactggatttagcagacaaaaactttaaatcagctatgttaaatacttttaaaataacttaaaaagccatttctaaagaattaagggaaactatggcaatgatgtcttaccaaatagagactaataagaaagaaacaaatcatattttaaaataaccaaataagaattctattagagttgaaaaagacaacaactaacatcaaaaatttactcaagtgtttaagaaatgaggtgtcagataaaaagaatcaactaacttgaatatatagcagaaaaaattagtctgaggaattttaaaaaagaataaagaataaatgactagagctgaacatatttgtaggacaccgtgaaacataccaacatacatacaatgagagtcccagaaaatgaaaaaaatgagaaacaagaagaaagaaaatgaaacaataatggtcaaatccccacatttgatgaaaacattaatctatacatccaaaacctcaataaactcgtaaagataaagatccacatctacacacactatagacacattgacaaaaggcaacaacaacaacaacaacaacaacaaatgaaagagaaattattgaaagcagcaagaaaaagatgacctcacagacaaacaatcctcaataaaattaacagctgactttgaaacacaagcactaaagctggaaaagactggaatgacaccctcaaagtgttgaaagaaaaaagattgtcaacaaagaatcccatatttagcaaaactttcattcaacaatgaaaaaaattcaggatattccaaaatgaataaaatttgagagaatttgttagcagacctgccctaagtgaaatactacagagagtccttcagactgaaataaaagtatattagatggtaactcaaatacacatgaggaagtaaagagcactggtaaagttaactacataggttaatatggaaaatagtatttttgtttgaactattttcttatcctatctgatttaatagacaatttcataatgtaataattataaatttgtattagtgaatttataataaaggaaatgtaatttatatgacaataatagttcaaagaagagcaggaggaatggggatatcatggagcaaaatttttgtacaatattaagatccattttgtattaataagaactagatcatcttaaattaggatgctaattttaatcccaagacaatcactaagaacatatcaaaaaaagtatggcaagagaagcggcaaggaatttgaatggtacagtagaacatgtctgtttaacacaaaagaagacaacagtgcagaaacacaggaagaaaaagacataatgcatacgggaaacaaacagcaaatgacaggtataaatcctatcttatccatcattataataaaaagtaaacaaattaaatactccaataaaaatagacagattagcagaaaagattctttaagaacatgaggatatgatccaaccacacacactttaaaacgtttttttttattcactgactttgatgtgaatttttaagtggatgtaaaatcttagaatcatacattagagcccatctcactttctgtgtccgaagttagtccatagaaaattattccatggtataccaataggtgatcttataaaaaggtttcttctcttactggagtcttgctgagatatttcagtatattgtccaaaaatgaaatatgaaatgcaagaattcccaaagctatttccctatcgaataaaactttttctcataaatctcccataaaccatgttccatggatctcaaggcaagtcttctcaatttggagttgaaaaaactgtgtccaaaaacattgaataactcacaccaactgtcttttgatttctacttatgttattgtctccagaatgtacatgaatcactttttttctaccctgctgcaagacatcacagaattagatcagaatgcaggagtggaaaaagcaagagattcagcatcagaaaccaaaattccaactttctctaagaagatgagcagcaagagtttgcttatgtccctcatctttacttggcttcacttggcacaactgcaaaataaggatggtgagatttactgcacagggttgtcatgagtgtaaagagataaattgcattattcgctttctcctcaatatcatgctccttatggtttacatgatgcagaatatttttttctacagctctctatttcggatttacaatacctgcagaaatttttttttaacatggggacaaattttttgatatcaggactgctcccatgaagagacacagtttacatccttgtccttgcatctgggcaggctcgtgaatgcttcgactgataaattgagggatgaggtgttttactgtaaggctagaatatgaaaggcctcatatccactagaacactcatgcttagagtcctaaactatctcattagagggtcaattaccctattgctaccatgtctgaggaaaccaagctatgtggaaaagccaccgacaggcactccgatcagtgatccaagagtcataccagaccatgtgccagacattggaacaaagatgcctccagaatattccagtccccagttgtcatgtcatccccatatattcttgagcagaaataaacttcccttgctgaatccagtctggttttctgaccaacaaaatcatgagcaataagcagttgttgctataagtcagtaagtttggagacagtttgttatataacactagtaaccaaaagggtgctcatgaaaacagacttctctactggcattaaatacatctattataatgtccttctcatttgtcattatcgagcagttattaaataaacccttgagccacaacatgggtacaatgacagaacagcaactaagaatcatgctacttagaggagataatttctgacctataatttccattctactcttcacttattcacgtcaaaattacaatagaatgagatcaatttagctagagcggttaaacatttaagtttgaagaatgtgagaatggcataattcactaataaaaaaaacttcctcatttgaattagttactttagtctcttttcacttcatggataaattcctactccttcaaagtattttttcaaactaatacctgcaaaacaggaaatgaatatgcaataaaagtagacagtcatgggctacatgttagccttcaaatttaatttaaaactgtataattggatttatgtttttattgtaaatcataagtatgttcatgcccacgattattagtctgatgatggaaaattgaaaaacagtgttgtttttcagaggccctctttttattctgccataatccaaaatcacaagctattctacagaagacacacttcataagttggtgtcaataatggggagggttggccataagctccaggaggacagggactttgttttgttcaccaaaatgttcgcaatgctttgcgtatttgctgaattcaatgagcacataaatactcaattaatataaagtgataggcttgaatcaatatcattttgtaaaaataaaaagagcaaacttatccatgaatctggcacttttgattattgcttggtgcttggggacaggaggtgacaaaagtaattcttatggactagaaacttgagttgtaagaaaaaaaataaactggtgaagtagtgtgttgggccctgtgatatctaaaaccccctttaggactgaaaggcttatcccttcatttgctgggtaatgctgctagaagacgacttctactgccagtcctcctcggggagactgctttagctgaaaaaccaggcttgtcctagatcatgactctttccagtgcagcctacatccaatgactgatcacaaagagatatagctgggccaactccaaggggccattctagccccaaccccctactgcttcactggaactgcaatctcccttgtcttagtctattttctgttgcttacaacagaatacctgaaactaggtaatttataaaggaaataaatttatttcttacagttatggaggctgagaagtccaaggtcaaggagtcacatatggtgaggatcttcttgctggcgagaatgcttgcagagtcttcaggtggcaaagggcatcacattgtgagggagctaaatgtactagctgagctctcttttcttcttcttataaagccaccaggccaactcccatgataactcattacctattaatcccattagttgatgaatgaattaatttattcatgaaaaagacagagcctttatgatccaatcacctctcaaaagtcccatcttttaatactgccacattagggattaagtttcaacatgagtttcagagaggacaaacattcaaactgtatcatccctctatccagttctgctctttctccctcatttccacaaatgttcatcataagagcatttctaattaattagattctctatgctaatctctatctcagagaatcatgagctaagcctactatcaatgtcttttactttatcaagctgccatatgcaggatcgcacacacacacacacacacacacacacacaaaagtgcttcttcttatttgtattttaacagacagtagagctctcttataataataactacttccttcctggtttttcattgtttggtatggcttaataaaatgaatacgtctttgctttttcccatcctaagtatagatttaacctgttctcatgaaaaagtataaagaattagtttactgtagacttattatgtctttctatttttatcatttgtttttagaaattggtgagcccattcatgattacacatatgaacaaatcagttcccagtaactctggcagatttctaagcaatcttgcttagaaaacacctggtaaaatatactttcattcaacttcaggtgattcaaaagcagctgaaagtcacttaagtggaaatacaaatatgatgctgcttttcaaatcaaaagcaagatctcaactccacaggatgtggcagattgccaggtgtttcatttctgaccaacaactatactgtcgggagcttctctacgtaattgacaaaccaaaacccaaagcaccaaggttaacaattcacttctctttggccacagaactggtattgtgttattcctgtactgcacataaatcactttcatagggccattagagggttgttttgaggcctagaagactaaaatcaaacctctgggtagctgagcaatgtcagaacaaggtacagagtgggtttagggtcactttggagccactgtcagttttcttctttttttgcttctgaagctgcaaaatcattttggcccaagggcagtccacttgaattctatgcagacaagagacagactcgtggtttctccacaagattttgatgtactagatcaggacatcaaacatcagcccatctccagatataaaaagcaacttcgtaggttttcagattatgttttgccaaccatctggactatgagacagatacttgagacagaggatgttacaggagctgaccaccattgtcacaaatcattggtgtgcagaggttgaggtgcctcactcttccctgtatgtgtgccacaggactctccagagagctggtaaagaataggaaattaatgtaaatgtgtgttacactgagtgtgtgaaattgctaaagaaaagattaaattattacttgatcgtgttatttaacttcctttctttcgaacgaatagaaggaaatgaaaattgacatttctcaatgcctataatgtcagttgccctacataatttatatatgtacattttagttataaataatataatgggacataattaaaagtcccatttaattctcacaataaatgtatgaaaagaaaaaataagtccttagaacatccataacctacctcagtttatacaaataatcaagtgaaatcatttcagaatttgaatacaagttgtagtggcttcacaaaatatgatattcccacccttatgcccaatgccatgtgggctatgatctaagccctaactaaacagtaaaatatattctcttctgctgattttcttcttttttttaaactcataaaagaagtgaaaatttttccatacagtttacatttttactaatcttttcctctatgataaacttttggtagggccttctatttatgaagtgagccatgctcttttcatgaccctatttgttcaaggcatagtgggtaatactgagatgaagcaggcactgaccctaccttcagtttgttggttagtacagggcattgcatacaaagagttatcatacacggggaaagattcatgtacactttattatttcagccagactttgaaggattaaattgggagaggagaaaacaccataagcaaagggaacagcatagacaatcatggtgtgtatataggagcgggaaataattcaagattgccaggacagaggttgcatggagtgaactgtaaacagaaagaaataaattgtgaccatatcaaactgtatcagaggttaagcaaggaagtccagaggagagaagagttgaagactgtgaggattcttacaattcttcatttctctctgtatccacatcctttgccatgtaacatttctgggccaccgacctggggatggggtgatttgtcccttcacttcggctcaatcatatgacttgcttaggccaatggagtgttagcaggtgtgacacaagcagaatctagaaatgggcttgttcactggggcttgctttactatgcctccgccattgccatgagaaaatgcttgagatagcatgttggagaatgaatacataggaagtagagccaagctgctccagctgcacagttgcctgagccaagagtctagatcagccaacaaccaggcaagcccagacatgtaagttaagcatagttcagcagagtcacccggccaactcccagatgactccagacatgtgagcaataaacccaaattgtcatatgacactgaggtgtttttgttatttgttacacagcaataataatacaactaacacaggtaataaatacaactaacacaggatgtgataagattgaagacagataggtaatggagagaatgataagaaatagagagatagccaatacacagagtattgagaatatgcaagaaaattcaccatcaccaatagagatggtataagatttttaaggaaaatatctcaacaacttgccccccaaatatatgtagggtatttaaacacctgagactgaaataagttgtcagcagttcctccatatcataacaacactccaaattaaagagtgatacttagtaaattttactcagcctgcagactgatggccttctttctctgtacccattctttgttttgtccatcatgatatttcccttcatgtccatttattcataaataaatgcgcatctttgaaatattctttgaaacagaaagttatattgagggcaagaaataaggctagttattgaggcaatctcttatctgcaattcacaagtatcaacagtttgaaacctcaaggtttcggtaacttattcatggcaaaagctgaccttcactgacaaggtttatgtttgtttgttttttgtaatatttatcccacttagtttcactgcagaaatattaatgtgtttgaatatggagtattgtattgccttgactcagacctcactaatacatgggatatttctcaaggacaaaaaaaattctaaaatacatctgggcccacgggtttcagatacagaattgtagattgtattttaataatgcaaatggaaaatggaaagtagttggagagtaaactgaaaatgcatccgtaggaatagaggagagtaggaaagaaagtcttagtcaataaatgtgcagtgagttgtgagaaaagggaggtttaaaaggggaaaagaaaaaggaaaacataattagagccattttacttcaaatattgcaaataagccaccagaaaatgtaaaagcacagttgcatgtcctttatgtgaagaacaaagggatcgtttcatgctgatgtcatcatcagatagcagaatttcttgtttttctccttttgatctcacaaaatacttttgcatcagaaaatttaaagtggagattctcaaacttaggtccattatgttttcctgtgattattatgtagattatccatgaacaatattgagaaacacactgacataaaacctaatcaaggacttttgaatatgaattgcatataataaactttcacttggcttggggttatttgttcaaatactatgaatttgtcatctatttttttttttctgccaaggaagcatcctcttttctgtgaataacatctcctagggaatattttcttcacttgtttttagtcatggaattctacaatagactttcagttatattacactacccccaggcagagccagttggcctaaagttgaatgtaagacactaacagggtccaaacaaaagaactaaatttggaattttctatttcaaaacaaaggaatgaggaaaagtctctccctgtttgcaaagcattaacatattccttgagagggtatccatggccatatctgtcatttagatcaggagtgttcaatcttttggcttccctggggcacattggaagaagaagaattgtcttgatccacacataaaatataataacactaactatagatgatggccaaaaataaataaataaataagaaaaaaattaaaattaaaaaaactcacaaaaaaatctcataatatgttaagaaagtttacaaatttgtgttgggccacattcaaagctgtcctgggtcccatgggccatgggttgaacaagcttgatgaagacagttcacagcaagagaaatgaaagttatgatacggtgaaagaagcagacacaagagtgtgaggaagagtattctggtacatttgagttcttgattctatttgtttaggaaaaccagatgtctctttgcccttccaaaaattatatgagacccaatatccttcaaatattttttcccgtggcctaaatggcatggttaggtttctatcacttacaacctagtttgttctacttcttaattcttgtatttgtactttatttttcttattttagaaaattaattcagaatcaactacatatactattatatagttctaatctttgtatttctgaacatactttgttgtgtatggctttcctcaacaaattttgtaaaagcagaactctgcttctctccaattatataaatagctaagagtattcactggtgcaaaacaagtttaaaaataattctgttaaaaatagttgtaattacacactttatcatggattgagaattttttaaaatacacagggtacaagatacactactggacttctggtgcagtaataaataaccccaaagtctcagcagctcacaacaaacttatatttcttgcttgtgattcagtaggtcagctgaagcagctctgctccaagtgcacagcaggtttcgaactgttccatttagcttctcatttttttacccaggctgaagccccaccccatctggaatgccttgctcttgtgacatttacatgccaaagctcaatgggcagtagaaacaaaaatgcttctcataatctccctgagagctggcctacttgcatgtattccactggagagctcaagttacacgaccaggcccaaagtcaataagacaagctaatcttctccatccatgctagacacataaagacagaagaaaatgaagaattgtgcccaaataacataagcttccacataatactgaaaaagagcaaacaaaaatccatttaaaaatatgttgacaaattaggaaaattgaatatgtatcctctagtctaatacatacacacacacacacacacacacacatatgtataatgaaagacttactggatctaaataatatatgttatccacgtattatgcccctcacagatacacacagacatacacacatatatttaataaaaaagatctgaatgaaattctgcttccaatttggctttcagtttttcatttttctcaattcatcaaatgacgttttcttagcaactgtgcaattttgaagactgtacagaaagcatgaccatgtgttgtcttcagtttttaaataagatcaattatgtatagacgtatctagcatgagctttagaatgtatcaatttttaaaatccaaatatgattggttcattattccatccatttgcccattagtcaaattttgttaaaaatcattcacaaaataacttttcttttattgtggaactttgtggaactttgaacttgagagagatgacttagagtatccggcagaagaaatctttaagcagcaaagcattcaagaggtaacatgggtgctgataaagggattcagttttataagggaagcagagcacaaaagttcagaaaatttgcagcctgataatgcagtagaaaagcaaatgccattttctgaggagaaatcgaagccagctgcataaatttgcataaataatgaagaacagaacactaatcaccaagacaatggggaaaatgcctccagagcatgtgagggtagccctcccatcacatgcccggaggcctaggaggaaaaaatgttttcatgggccaggcccaaggtccctctgctgtgtgcagtctatggacttgatgccctgtgtcccagctgctccagccatgactaaaaggggccaaggtatagctcaggccatggtttcaggggtgcaagccacaagccttggcagcttccacatggtgataagcctgtgggttcacagaaatcaataattgaggtttgggaacctccacctagatttcagaggatgtatgtaaacacctggatgtccaggcagcagttagctgtaggggcaaggcactcatcatgaagaatctctgctagggcagtgtggaaggaaaatgtggaatggtgcctccacagagagtccccattgatgcactgctgagtggagctgtgagacaagggccaccgtcctccagaccctggaatggtagatccaccaacagcttgcactatacaactggaaaagctgcagacactgaatgccagtccgtgaaagcagctgggagggaggctgtatccttcaaagccacaggggtggagctacccaagaccatgggaaccccctcttgcatcagcatgacctggatatgagacatggaatcaaagatgatcattttggaggtttaagatttgactgccccagtggattttggacttgtatggggcctgtagcccctttgttttggtcagtttctcccattttgaataggtgtatttattcaatgcctgtacccccattgtatctaggaagtaactaacttgctcttaattatactagctcataggcagaaaggacttgtcttgtctcagatgagactttggactgtggacttttgagttaatgcttaaaagacttaagactttgggggactgttggaaaggcattattggttttgaaatgtgaggtcatgagatttgggagggaccaggggtgaaatgatatggtttggctgtgtcccacccaaatctcgtcttgaattgtagctcccacaattcctatgtattgtgggagagacccggtgggaggtaattgaatcacaatcacaggggcaggtctttcccatgctgttctcatgatagtgaataagtctcatgagatctgatggttttataaaggggaatttccctgtacaacctttctcttctcttgtgtcctgccatgtgagacgtgcctttcaccttccaccataattgtgaggcctccctagccagccatgtggaactgtgagtccattaaacctctttcttttatacattacctagtctgggatatgtctttatcagcagcatgaaaatggactaatacatttacctaggcataattttctaattgccaaaattagtgacattaaaaatggaaaggtttcctttgttaatggttgaaagagttaataccattaggatggcaatattacccatagcaatctatagattcaactcaatgcgatttctctcaaatttctaataagctttttgttttttgcataaatgtaaaagtcaatcttcagatttatatagaatttctaggggcacaaaatagctagaacaacattgaaaaagtttgtaagaacttttttcttgcaaagttggaagatttatgcttctcaattttaaaatattacatttcccaagtgtaaaatttaattctcaaatttacatggaatttctaaggcccccaaaaaactaaaacaatgtttaaaagtttgtaagaactttgttcctacaaagttggaagatatatgcttcccaattgtaaaacattctataaaactccagtagcctaaacattgaattgttctactggcataaagatcgatatttagacaagtggaatagaattgacagttcagaaataaatctgtgcatttatagctaattgaattctgacaagggtgacaagaccgttcaatggggagaaaaagtctcttccacaaatgatgatgagacaactgggtatccacaaaaactaaaacaaaaaattggacccctacttcgcgttatatataaaatttaactcagaatgtatcagggacctaaatgtaattcttagaagaaatcctacaggtaagtgttcatgaccttgaatttggggatgagttcctacatgtgacaccaaatctacaagaaacaaaagataaaccagacttcaaagttaaacttttgtatggccaagaacattatctagacatgaaaaggcaacctatgaaatgaaagaaaatatttttaaatcacaaatcttataagggtctactatccaggatatataaagaactaaactgcagcaagacacacaatctaattaaaaaatgagcaatgtacttgaatagatatttctccagtggccaacaagcacattaaaagatccacaacatcattactcattaggtaatgcaaaccacaaccaaaatgaattaccgtttcacacccactaggatggccacagtttttaaaaaaaacaggaaaaataacaaatgttagcagtgatatggagaaattaaaatcctcctacattgctggaggaaatgtaaaatggagcagccactgtggaaaatagtttgacttttcctcaaaaggttacacataggattttcatatgacctaccaacttcacttctaagtatataatacagtttggatgtgtgtccccacccaaatctcataatgaaatgtaatccccagtgttggaggtgaggcctggtgggaggtaattggatcacggaagcagaattttcatgactggtttagcactaacctccttggtactgtcttcgtgatagtgagtgagttctcctgagatctcgtcatttaaatgtgtgtagtccctcctgccgccactctcttgctcctgctctggccatgtgtcatgcttgctcctccttcaccttctatcgtaattgtgtttcctgagccttccccagaagtcaagtagatgccagcatcatgcctcctgtatcatgcctgcagaactatgagcaacttaaacctcttttctttataaattacctagtttcaggtatttctttatagcaatgtgagaatggactaatacaaaaaattggtactaggattagggtattgttataaagatgcttgaaaatatggaggcaactttggaactgggtaaagggcagaggttggaaacctctttttattgtaatttacccagtctcaggtatttctttatagcaatgcaagaatagaccaatatagtatacatccaaaagaaatgaaaactagtcctctaataaatatatgtacatgcatgttaatagcagcactattcacattgcccaagcggtggaaacattcccaatgtccatcaagggatgatagataaacaaattgtggtatgtacatacaatggaatattattcagcagaaaaagaataaattattgacaaatgctataaatgtggcaaaaccttaaaaacattacgctaagtgaaagaagccagtcacagaatgattgtatgattccaattacatgaaaaattcagaatcagtaaatccataagaactgaatgcagattggtggtttccaggggtagaagagtgatgggaataggaagcaactgcttagtgaatacaagcttttcttttgggatgatgaaatgttttgaaactagataaaggtggtgattatataacattgtgaatgcaccaaatacccttgcattattaactttaaaatgatttttttttaagacagagtctcactctgtcacccaggctggagtgcattggtgcaatctcagctcactgcaacctccacctcccggactcaagtgattctggtgcctcagcctctggagtagctgagattacaggtatgcgccactacaccaggctacttcttgtgtttttagtagagacagggtttcaccacgttggccaggctggtcttgaactcctggcctcaagtgattcatctgccttggtctcccgaagttctgggattacaggcactagccactgtgcccaaaaatgaattttatgttaggtgtatttcaccttaactgtaaaaaaagtggcattgttttacaaacataaatcttactatcatagagaagactgaatactagaataattgaggaacccaagtaacctccttgaatttcttataaacaaagcaataatttcaaaattaaaaaaatttcaatgataaatattttgctcctctgttcttttttgtttatctttcctgcaacatgcctttgaatcttaaagactatgaaatatcatggacagaaaaaattaaaatcaagattgcccatgtcaaatttttacctaatatgtgtttcactttatagaacagtattttatatatgaggaaataacccaaaagcacatatcatttgccaatttgaatatctcatgttctgttgaaacaatggcttcctgaaaagagttgattggatatgataatttaagtaatacttattttcattaaactttttgaggtcattacagactcacatgcaatagtaaaaaataatacagagtgatattatgtactatttgcttggttttccccaacattaacatcttgcaaaactatatagtgcaatttcacaaataggatattgacatcggtacagtcaaaatataaaacattttcatcaccacatggtacctacttgctttttaatgactatatccactttactcctaccccccacctctataacccatggcaactactaacccattctccatttctatagtttttttcatttcaagaaagtatataaattgaataatatgctacataacgttttggggttgactttttaagtctgcataattttctgtagattcatccaggcagttgcatatatggataatatgtatgtttttgattgctgagggatatttcatgataaggatgtattacagtttaaccattcacacatctggattgcttcccatttgggttactatgaaaaaaacttctataaatatttgagtacaggtttttgtttatgcatttttatctctctggtataaatgcctagggatacaatttatgtgttatatgatagttacatgtttggtactataagaaactgccaaactattttccagagtggctgtcctattccacattccaatcagcaatgttgagtcatcctgcattttatattattgctatttaaaattttagctaatttaattggtgtttagtgacaactaattgtggttttagtttgcatttctctgatggttcatgattatgaacatctttttatttatttgcatatgaaaagtttatcttctttggtgaaatgtccccttatatattttgcctatgttttagtaggaatttttgcttttatattgagattttgaattctttatatattctagatactagtcctttgttcaatatgtggcttaaaaatgttttctcccagtctgtaactttcccttttattctgtttgcaagatccttcatagagcaaatattttaatttttgattaagttcagtgtattactttttcctttactgcatcctacttttggtgacaagcttaagaaatttccagccctaaatcctgaagattttgtttaaaaaaaagttttataattttctgatttacatttaagtctacaattcagccggacatggtggatcatgcctgtaatcccagcacgtagggaggccaaggcaggaggattgcttgagcccaggagtttgagaccagcctgggcaacatggccaaaccccatccctacaaaaaaatacaaaaattagatggcatggttgtgtatccctgtagtcccagctagggaggctggggtgggaggattgcttgagcacagaaggtcaaggctgcagtaagccgtgagtgtgccaatgcactccagcctgggtgaccagagcaaaaccatttaaaaaaaatgtctatgatccattttgagttaattttgtacaaggtgcaacacttgggtcaaggtcttttttttttcttcctttggcctttggatgtctgatcgctccaaccttatctttcctcctttcagttacttttgcacctttgtcacatgtgcctactgcgtatttatgtaggcctatttctggattcctttgtgttccattgattcatattccatccttcaaatactacacagttttgactactgtaactatataataagtcttgaaatcagatatactgattcttcctactttgtttttatttttcaaaattgttttagctattctacatcttttacatttccatatcaattttagaataatcttgtctctagctagaaaaaaactttctggaaatcagataagtattgcatgaaccctgcatatcagtttggagagaatttatgtctatattatgttgcgtattcccactagtgaacatagtatgccctcttgaccatttatttagatcttcttctacttccttcataagagttatgtaatttttagcacacaagtcctgtacttactttcttagattacactaaatagctttctttttctttttgggtgattgtaagtgctattgtatttttttatttcactgtcagtgttcattactaatatacagaaatataattcattttatatgcatttcttctatctggtaaacttgctttatttggttattagctctaataatattttggaaattccttgcagtttttttttgtttttttttgtttttgctttttttgtttgtttgtttgttttttgagatagagtctcattctgtcacccaggctgcagtgcagtggcatgacctcggctcactgcaacctctgcctcccaggttcaagtgattctcatgtctcagcctcctgagtagctgggattacagttgtgcacctccacaaccagctaatttctgtatttttagtagagatgggattttgccatgttggccaagctggtctcaaactcctggcctcatgtcaatcgcccacctcagcctcccaaggtgctgggattacaggcatgagccactgcacctgggcacctccttgggattttctacatagacagtcaaactgaagccaactgcaaaaagggatatgtttaactcttcctttccaattaggatgctttttactgtctcttatcttattgcactggctagaactttcagcactattttgaaaaagagtggtgagagaagacatccttgcctttttcttggaagttgaaaagaagcatacaatttttcatctttaagtaaaacgttagtgatagtttttttaatatatgtcctttatcaaattgagaaagttcccttctatttctgtttttctgagtttttcttataaacaaatattgaattcatctgttgatatggtagataaattgatttccaaatattgaaacagtcttgcatccatggaatatactccacttggtcatggtgtgtagttccttttatatagtgataaattctatttgctaatgatttgttaaggattttagcgtctctattcagaaagaaaattggtctatagtttcctgttcttaatctttctttgatatttatattatagtaagactagtttcataaagagaactgaaaattgttctcttatcttctattttctggaaaagaatgtgtagaattggtgctaatttagcaaaattctccattgaaagcattcaggcctgaagcattctctttggggtgttttaaattacatataattttctgaataattataggacgattcaaattatcaatttcatattgggtgagttgtggtagtttgtgtatcttggggaattgatccattttatctgattatcaaatgtatgtgtgtaaaattgttcccttattatgcttttgatatttgcagcgactgtagtaatatcctctcttttttacctgatattagtgattcatatcttctttttttcttgttgtcttgtgaaaaaatgtctattttattgatcttttcaaacaccagctctttgttttattgatttgctcattatttctttgtttctctgtttagagtttattgatttctgctcatggcttgattatttacttccctctgattgatttgggtttattctgctcttcttttttcaagttcttgtgatgaaagtatgattgatgtgaaaattttcttcttttctaatgtatgaatttagttttacaaatttccctctcagcactactttagctgtggtgcacaatttttgatagactgtattgtaattttcattccattaaatatattttttatttcccttgaaactttctcttcgattatggattattttttgaagtacttttttttctttcaagtcatccttctgttatcaatttctagtttgattccattttgattgaagaaccctatgatctaaattctttaaaatttgttgaggcttgttttttggcccagtgtctcttgctacatactctgtgagcatttgaaaggaatgggtgggtattctgataatgttggtggagtagtctataaatgtcaatttgatattgagtagttgatgacgttcttgagttcttctctattgttactgatttttgtaaagttgttatatcaattcttgagatggaggtgttgaaggctccaactgtaattgtaagtttgtctgcttctttcccttccagctgtttttatttcactcgtttagtgctttacttttacttgtttagtgcatcatatttaagattgctctgccatcttggtagattggcacttttatcatatataatgttcctctctgtctctggtactatcttatgctctaaaacctgcttcatttgatattgataaaactattcttggtatctggtatctacccaaaggaaaagaagtcattatttgaaaaagatacttgcacactcatgtttatagcagcacaattcacaattgcaaaatcatggaaccaacccaaatgcccatcaatcaacgagtggataaagaaatcgtgatattgatattgatatatatatatatatatatatatatatatatatatatatatatcggaagcggagcttgcagtgagccgagatcgcgccactgcactccagcctgggcaacagagagactccgtctcaaaaataaataaataaataaaatgaaataaaaatgaaaacataatgccaattacattatcactcaaaaaatgatatacattgggaagaatctaaaaatatgtacaatatctaaatgaaataaatcaaagatgaaataaatcaaagaactatatacacatatatatatacacacacacacatatgtatacatatatacatatatacacatatatatatatacacatatgatggaatactactcagccataaaaaggaatgaattaacagcatttgcagtgacctggatgagactggaatggaaaactaaacatcatatgttctcactgatatgcaagagctaagctatgaggctgcaaaatcataaaaaatgatatggttgactttggggaattgaggggaagagtgggagggctgtgaggataaaatactacatatatggtgcagtgtatactgcttgggtgatgggtgcactaaaatctcataaaatcaccactaaagaacttactcatgtaaccaaatacgactcacggaaaaataaaataaaataataaacatttaaaaaaagaagtgaatcaaagaagcaacaagggaaagtaaaataaaaacttttattttccttgttttgaattgatctaaccaatttgttcaaaataataatagcagcaatgtatttacttatgtgtgctcatttgtgtttgtgtatatacacatatatgactatgtacaagtgaaatgaatggcagcaattatgtaagagacagaagagtggaattaggattatttttttattgtgaggtacttttactacacgtgaagtggtatagtgttttttgaaactgtccttgtattagttgtaaatgtatatgacaatcactagtattgtgactgatatcctatgaatggagatagaatgaaatcttataaaatggtaaatttaaactgtaaaaggcaggaaaagagtaagcaacaaaaaataaaacaaatagcaaagacaatgaatagaaaactgacatatatgatagatactaatccacctacaaataatcactttaaaagttaatgttctacatggacacaggaaggggaacatcacacactggggcctgttgtcaggtggggggagaggggagggatagcatttggagatatacctaatgttaaatgacgagttactgggtgcagcacaccaacatggcatatgtatacatatgtaactaacctgcacgttgtacacaggtactgtaaaaaagtataataataaaaaaaagttaatgttctaaatcgaccaattaaaatagaaagattgtcaaaataaatcaaaaccaagattcaaccatatataatctacaaagaacccacattaagaatacaaacaaatacaggttaaaagtaaatggatggagacagccatatcatgctaacactaattgaaggattaatatgctacaggttctaacgataaattctaaaaagaaaaaaaaatacagctaataaacaaaaagaaatactaaaccttgcatatgacctgatcatctatgtagaaatccaaaagaatcaacgaaaaatgtccttgaactaataaacaactatagcaaggttgcaggatgcaaggttaatataaaaaataaggcctggcacggaggctcacacctgtaatcccagcactttgggaggccgaggcgggcggatcacgaggtcaggagatcagaccatcctggctaacacggtgaaactctgtctctactaaaaatacaaaaattagccaggcgtggtggcgggtgcctgtagtctcagctactctggaggctgaggcaggagaatgccatgaacttgggaggtggagcttgcagtgagccgagatcgtgccactgcactccagcctgggcgacagagtgagactccgtctcaaaaataaataaataaataaataaaataaaataaaaatgaaaacataactccaattacattatcactgaaaaaatgatatacattgggaagaatctaaaaatatgtacaatatctaaatggaataaatcaaagatgaaataaatcaaagaagaactatataaatgaagagatttgaagagatactacattttcatggatagaaatattcaacattgtcaagatatcagttcttcccattttgatctacagatccttttcaatctcaataaaaatttcagcaagttatttggtggatatcgacaaactgattctaaagtttacatgaagaggctaaagactcagaatagctaacacatcactgaagctggtggacaaactattgtaagtccaaacttacaacacagcttcaataatcaagacagtgtgatattggtgaaaaatagatgaatagataaatggaacagaacagataacccaaaactgacccatgtaaatatagtcaactttgggaggctgcagcaggcggatcacgaggttaggagatccaaaccatcctggctaacacggtgaaaccccgtctctactaaaaatacaaaaaaaaaaaaaaaaaaaaatagccgggcgtggtggtgggtgcctgtagtcccagctactcgggaggctaaggcaggaaaatggcgtgaacccaggaggcggagcttgcagtgagccgagattgcgccactgcactccagcctgggcgatggagggagactctgtctcaaaaaaatatatatatatatatatgtatatatatatgtatgtatgtgtgtgtatatatgtatgtatatataggtatgtgtatatatatgtatgtgtgtatatatatgtatgtgtgtatatatatatatagtcaactgatctttgacaaagaagtaaagatggtagagtggagcaaagacagccttttcaacaaatagtgctggaacaactagacagtcacatgcaaaaagaaaaaaagaatttagacatagaccttacacccttcacaaaggtaacaccaaatgaattataggcacctaagtgtaaaatgaaaaagtataagtctcttaaagaataacataggagaaaacctagatgatcttaggtataacaattttttagacaggatgccaaatcacaatctatgaaacaaagaattgacaagctacacttcattaaatttagaaacttctgctttgtaaaagatgctgtcaagagaattagaagacaagacacagactgggagaaaaatagcttcaaaagacataccagataaatgacacttaaacaaaatatacaaagaacgtttaaagcccagtaatcagaaaactaatgaccctgatgtaaaaatggacaaaggacgcaaacaaacacctcaccaaataagatatacaaatggaaaataaccatatgaacaggtgctcaaaatcatgtcgttagagaatttcaaattaaaacatcaattggatgtcattacacacctattagaatagtcaaaacactgactataccaaatgttggtatggatggggagcaacaggaactttcattcattgctggtgggaatggtacagccactatagaaaataatttggcagtttcttacaaaactaaacatacccttatcatatgatccagcaattgcactccttggtattcatccaaatgagttaaaaactatatctgcccaaatacttgcacatgaatatttatagcagttttatttattcatataattgccaaaaattggaagcaaccaacatgtccttctgcaaatgaatggataaacaaaccttggtacattcagacaatagaatatgattcagcactaactagaagtgaactacgaagccataaaaagacatggaggaaacataaatgcatattactaagtgaaagaagccagcctaaaaaggctatatattgtataattccaactgcatgaaatcctgcaaaagtcaaaactatggagacagtgaaagaatcagccaggagctgggtggaggaggcagggatcatttcatagagcagagaagatctttagctcagtgaaactactctgtataatactataatggggaacgtaagccattatacattggtcaaaactcataaaatataaaacactaagagtgaaccctaatgtaaacaatggactttgggtgataatgatatatcagtataggttcatctagtataacaaatgtaccacttggatgtggaatttttgtagtgggagagcctgtgcatgtgtgggagtagggggtatatgggaaatctttctactttctgctcaattttgctgtgaacctaaaatgtctctaaaaaaaaaaagtcaaatttaaaaacaaagaaacaggcaacttagactaagatgacctcttcaggaaacaattcaacccttaaaaaaaataaagttccactggatgagacaaatgtggttaggtgtgtatctcatgtctttcagctggccccccaaatcctcatccaatttgggcttgctgatgctgggtgggaaatgaattttacgttgactgtatggctggatattatgacttgaagtccaagtttccatgagctatcatggaagggttagcctgctgaactgaatgattcagttaatcctaaacctcacatgaagcattaattgcagccacctctgcctctcccaagtgttttgccaaaactaataacaaatcaaaaggattctgctgctttcctggtgaggtactagggaacctggatatcaatgaccataatttctgaaggtctgcttatgtccagcttctaagagagatgcaataacaactaacatttgttggacaattcatatgtgtcagatattgagctaagtagtttaccccattatataattccctagcaacactgtgaacttcatattaatattcctattttacagatgaagaaactgaagttcagagtacttgcatatttttcgccaggttacactgtctgatattagtggtttctaatttcaaaacccatactccagatatgatgcactgagacggacttggcatcttttctgtggtctggccaggaatgcacagtctgaatctggttaggaggaagtggcatgcctgaatcaagggcacttggcaaggttaccattctgtgctctccagagatgctgaggacatgagaggccaggaagggcctgaaagagtttcagatgaattgtcaccagaaagacatgatagtgtaagatcttgaattggatcctgggccagaaaaatagcactggggacaattggcaagacctgaagagatctgtagattagatgatattactgtacacatgttcatttcccagcttcccagcttttttttttttttttatagacagaatctctgtcacccagcctggagtgcagtggcacaatctcagctcactgcaacctccgcctcccagggtcaagcaattctcctgcctcagcctcccaagtagctgggattacaggcatctgccacgatgcctggctaagtttcgtatttttcgtagagacggggtttcaccatgttggccaggctggtatcgaactcctgaccacaagtgatccgtcagcctcagcctcccaatgtgctgggattacaggcatgagccaccaggcccagcccatttcccagcttttgataattgtactgtagttgaataagacaatgttcttgtttttaggaaacatacatggaagagtttagaaataagagaaaatcatgttataagttattctcaaatatttcaggaaataaacccatctataaacacacacacatacacacatataagggcatttcctctattgcccctgtctttgaaagatcttaaaacaaagggagcaacaccaatttagtctccaagttacagttcttttttttttaatttacttttttcaacaattattttaggttcagggggacacatgtgcaggttggctacatgagtaaattgcatgttgccaaggtttggtgtatgaatgatcttgtcactcagtagtgagcatggtacctgataggtagtttttcaatctttcccctgccccaccctcccccaactcaagtaatcctgactatgtattgttcccatctttgtgtctatgtatattcaatgtttagctcccacttataagtgagaacatgcggtatttgggtttctgttgctgtgttaattctcttaggataatggcctccagctgcatccatgttgctgcaaaagacatgatcttgcctaaatgtaccaaataagaaatgcagaattaggaaagtcattctaaaagcaagagaaatgatccactttgcataattttgtttaatatttattctgtgtcttcccagtattatattagaaacctaaaaagatccaaattcagaactcctactcctaagggatatacatagtatttcaattttaattgaatatgcgctgaattacaggggatgagtctataaatctcaaattgaattaccttgttgtaaaagactaaaataagaaaatagcaaaaaaatctaacttggccaactttttcataagtaaatattttaaaactaaagttttaaactttagtttaatttaaagttgattaaatccttaacactttactaatgaatgcttacagtgttgtcattaaggccaattatttgagacaactgacataggacaacaagcaccatcatattcaagctaggaccatccaatgtgccacagcctcctctaatatatattagaagcccagatatatgaaacttgatggaaacttattgaataaacaaaggttgaaacagatgcaatctcatcagggcatcaaaacaggcatgagttttaatgtttctgatcatggaaagtcaacttgcattcattgcattccagtaccagacaattcttattttcagccccttgaagtcatcctcgggtaaataatgtgggacaatgcattttccaatattacttcataggtcaagcttaattacgcagaaacaactttctcgaacagcaccagtcccccaacacttagctccacagctgtctggtgacaggatgactacatggccttggtataactcgttacccaagacaatactacattcattttgatcctgaatgaaagacctccattccaggtgcaaatgttgccactactatcttatagaatggaatataaaacaattctattttaaatatttctgctgtttctgcaatcccttttcttgattcagcaggcatgactggactgaggtttcatcaatcatctgtcagcaggactgtgagaatgtggctagcaaggctgcttgcaaaggagaccattaagaaatcactccagcaggtctagtttttctatctttatgtaagtaatatttgccatcacctggcatttcagattaaaagtgttatgtgactcccctggtgctggaaggaggtttggaagcaactgtgtagatcctgttagtcatgtgtttctatggttatttataaatattatggccaaccttagtcaatatatgatgattacaaattattatttttttaattgccaggagctgttttcttccagaggtcatttagaaaggctttcatgttcatttgactctgatgaatgtaacttaccagacagaaaatattaacaaggccaagattttggcagttaggttaagattcagacccaggcttactgtgaagagtgagaatagaatgaataagagcaaaaaggaagtcttttttgactatgtcttgaacggtgtacttatttacaagcatgagaacagtaactctcaaaagaaaaatcacctatattgtggacccagggttgtctgctgtaacataacttttctaggttacacaaaacagtagaattaggaggtttcttgtattcttacagactacatcattgacaaagaccactatagaagctcaataaagaattatattgaataaaatgctaacattttgaatgggaaggaaattcagaaaggtttgctgagaaactcagctgatgctttatgtaaaatgtgcagatttagctttggaccactggccagcctcaagttagctcaaggccttagaataaacacatcttggagcttgaaggctgctaagtgaagagctaagtgttggagaaaaagacttaggaaccaagcttgtttgcaccataaacataagacagagaaaattaattcagtcaaacttgaacaatagcagtgaaaagcctcccatatattttctgcatctattttttaaaatatccctcttattgctaaatgaaacagatgcaaccacattaagtgttaacagcttgaataagcaccttctatcaatacccataatggcaatgacaatgcagtgttttaagatcacaattgttgcttttgcatatcaaacattttttatgaatcccttaggtacctgtttagtgaatgttttggcattttggcatgttttccaggaggcatgacacattttttttttattttgtcaagtaggctctctgccccagacaataaaaagggctcaaaatacaagaagacaatacttgattttaaattcttctcttttgccagtttagcccttctgttgagtcaaactatatctgtctacatctaaatctatccctattttgctgtcaaagaaactaaggttcaaaaaatttatttcaattctcccaacttggatttgaaagagctggactttgaacccaagtctgcaacttttatttatttgtttatttatttgatatggagtcttgctctgtcacccagtctggagggcagtggcacgatctcggctcactgcaagttccacttcccgggttcacgccattctcctgcttcagcctccagagtagctgggactacaggcgcccgccaccacgcccagctaattttttgtatttttagtagagacgaggtttcaccgtgttagccaggatggtctcaatctcctgaactcgcaatctgcccgcctcgacctctcaaagtgctgggattacaggcgtgagccaccacgcgtggccagtctgcaacttttaaacaatgtttttctattatataaggagttaaggataaatttattactaaagctatacaactaattattatatttagttttaatatgttcttaattttttaattataatttaaattataacaattcattctgtgtttttcatatacagcagtgacatggtaagcaaaataaaagtgagtcaatttaaagaaggatgctaatcagtaattgtatagatggcaaaaaaagctggaggaagtacacaaagcacaagagtgcttagaaaaaacatgctacaccttagggcttatctgtagattaaaggataataaatctgtctcctgaaatcattaaacattagaattaagagtaaacaggagaaaaatattttccaatttccctgtcaccattattttataaataaaacattgagggttggaagttcattgactgctcaagtcacatgaatacttttgagaaaagctgagtttagaactctgtgttgaattccctgcacaggctagtaggagggttatttgacacatagattcaggagcagaagagtggaccaaaaatttctctgaaaatatgccagcaaaacattagctgtcactactgatctggaatccattccattcagcaggtattacacagatagatgtcttatcatgaactaatcatattttttttcttcagctaaactctataatggttatgaatccagttaagaactatcttccaattgagaactatcttcatagtagtcacttctaaagctattactccccattctgtgatcctgccattatggtcaaaaatatgcttgcatcttctaccagttgaggcccaagtccacatatctatccatgtatttgtttgttttcttgtagctgttttgggtttttttattgagacagagtctcacattgtcaggttggaatgcagtggtgcaatatcggctcactgcagcctccacctcctggtctcaagtggtcctcccacctcagcctgccaagtagctgagactacaggtgtgtgccaccatgccagggtaatttttgtatttttttgtagagatgaggtttcaccatgttgcccaggctggtctgaaactcctgagctcaagcaattctcctgccttggcctcccaaagtgctgggattacagatgtgagccatgatgcccagccctattcatacatttgagaaagacttaccaagtgcctattatgaaccaagcactgtgtaggggtaaagtgcctatcttctgagagcttatgctcaaatgagggagactggctattcacaaataaatcaataaatagatgataattgatttttattagtgctacaagaaaaattaacagggaattatggtacagaatgagagtaaggccgttttgttgaagcaaaacttaagctgagcgctgatagaagagacaaaccacaacaagatctgatcaatgaagaaaaaaatattccaggcagagaagagagtagagaaacaccttgtagcctaaataagtgggtatgttttgagactttaaaacaagcctcctaaatattttcagaaaaagaatggtagctgaagatgaggaggagaaagatccagatcacgagggcatttataggtcataaataggagcacagtttttattctaagaacaatggatttaagcagagaagtgacataacatgaatttaaggttttaaaaggtccttctggctgtgatgtggagtataaattgttgaggcaagagcagaaacaaataacccaatctttagacgattgcagaagtctggataagacatgatgatggtttatatagacagggagttctcaagattgagaaaaatagatgagcatgaggtatattttggagagagaattgacagggcctgctgatgaattggatgtgggggatgacggaaagggagaagtcaagaatgactctcaggcttctggctttggtaactgggtcgatggtagagctgtttacagagatggaaaaggtgaggagagccaggctcgaaggggaaactaaggactctgtttggccatactaagctagagatgcctatgagacatctaagtagaagtactaaattgataattgaatgtttaagtctcaggtttataggaaacacgtggcctgaagacaaaattgaacacctgcagcttagagatgggtttaagctctggaagacaatgtagatgatcttggtgaagctgtctccacagacaaggcttgccatttgcctccagagaccaagaatttggatcattgacttctcacctcttcccacacactttctcttctgggtccttcccctctacagagctgtgtcttagcaaaatttccatttgtcccttcaagctgaccagagagcaggaaagcaggcatacaggtccttctcattctgagtgtttttaacagcagtggaaaaatcccaattcaagcaacaagtacaaccactaagggtagtctttagtaaacactggaaggtttttttcttactgtaaacggagctatcctatgaccctttgctctaagtttgcttctgatgcctaaaggaaagattctcatttatcctttgtcaataacgtcatcaccccgtgagtgttctgaaagtcatttattggttgaatctacattgactcagaatccccaaaatttagatctggagaagtctccaaagactagtccaaatttgcataaaaattttcaagtttcatgttacatgaaaaataaaaaacctaaaatgtttaaggggctgaccaacatggcagctctatttatacttgcttaaagctctagggagctacgtgcaaggtcactcactacggtcaccagaatggcctctaattgaaactggccccttccagaagtcaaagacatattcacagagatttcacaggaagaagacttctaaaacaacgtttttatctcactatctactaaggggtcttgtgactccaacacggcaatgcatgtcataatgtatataaaaggctttaaaattttatgatgctttgcatagttgggatctacattacgttctccaacatttttctgtttctttgtaattattaaatctatacgtgctcagctaagaaagtttgaaaatgaagaaaatcataaagaaaacaaaatatatttaatcccaaaaggttttgataatcacagtttatatttgatgtatttcagacttattctatatatatcgggatatgtgtgcttctgtgtatttgcctgtggaagtggtacttatatattgtcatgtacatgtatatatgtttttgtgtgtgcatatatacagttgcccctccaggaacttgagcattcacaggaggtcatgaaaccaatcccaccttgatacaaagggaaaattgcatattatatatgtgtgtatacagatatgtattttctatcatacaacttttcccttatatatatattctcattgctcaatatatatattgagtcaactgttttttattttaccatagacagcgtggatgcagctgactttcttcaccttgtgagttcctggacaagaaaagtctgtgattttacttcttcccaagtaaacttcaggaaaagctaaaggtgccctgccaagttcccttcagtggaccaatgtatccctccctcagatgtgtcccacagtttccctcttctcaaaagaattgctctttgctaatgcttggggagccaagcacacatatacactacacatagacatacatgcaagggcagatgcatgggtgtattcaacctgcctcaaagtggaaccaactctatggtgcaattcatggtctagtgttccccattggatcaggctgaaactaatgtctagctatgataacacttgcttagcttcttcccctgccatctctgacttttctcacttaccttcttctaaaagtccttcttctgatgggacaactgggatatcttccaccatgcatcttatttcttagcaggctcatctgagcttatttacatggcaactaggcaggttcccaaggggaatagtggaatagcacaagatctcttgagtgagtcatagacttgaaagttccacactattaatactgctgcattctattggtcaaaaacaatcacaaggatgggagagtggggaagtgaaccccagctcttgaatggagaagctacaatgtagcattgcaaaggctctggatacagagaggggtaaaaaaaaaatggaatcatttggtcaggcacagtcacagtggctcacacctgtaatcccagcactttgggaggccaaggagggaggatcccttgagccctggaatttgagaccagcctgtgcaacataatgagattcctatctctacgatatttttttttttaaaaagagagaccattttttttttaccatcaatctattacaaacaggaagcactttaatatgcagaaggaacaagaagacaaaatgtttacattcatggctgtagataaaaaagacatgaactcaaagcttagctttgccagttttcagatgttgaccttgggaaagctacctaaacttctatgactcaattttctcatcagtaaaatgtatgggaaaagagtactcacctggtagcactgttgagaaaattaaattatgtaatctatgtaaggcttttagcaaaatgcattgcatgttataagctcccaataagattggtcatgttaacattgtaaataaagatacagagtgtatgtttaagcaggtgaggagtgttctttgttgtaggatgcacttacagagcacaggtcgaaaccagcaatccctcactggaactagcattggatggccatgatgattagtgtttgcatcaccaaaaaccctaaaccaagaccgggaaaatctacaaactcaccttggttcatactcctgcctagagaatgacagagagtgtagaacatacttgcctcagagggatgagaatcccatcacagttttgattctcactctcaaggctttaaaataaaacaatttacttttctcctaagaactatcattttctgccaaataacagtattactataaacacttacttttctaaattttgtattctagaaatgctaggtgcactagagatgtaaaggggaactaattgaggtgaacaagaaagaacattagcctgtgagtaaaggaaacaagtttcccaggtgtaagcaaaaaatgtgagaatgttccagaccaccaagaaacgataaacatagatatatgacaatcagagaaagtgaaagaacctgaacttattttgtaaaccagaggggacaaaggtgaaagggacttaatggccctgattatatggtttccaaattttttcttttctccacttgacaaaatagtgaaagctcgcttagtcgcagactttcagaggttaagcacaaggaaaaatttcttaacaagcaggactcacttgacacaagaatgaatggccggttgagtttgtgaaatatgctccagagatttctcagaaaaggcatgggtctcatgtgtctttggtttaccagttagatgtagcctcactgtgcagtggaaaaactggattcactagttgaaacagagatcttccaggctctgattctgtggtgcagacattggtccatggacactggaaaaattcaatgatgtctcctaaaattgtgcctcccagaaatcacatttggggccaagattgtgacaagtgcctaacattgtccagactgcaaataagctcgtggatgttgatctttccagtgttacatgtgaacactacactggctcacaaatcatcttggtgagaattctccaagtatgaagcatggtgcacctagactccctagaaacacttcactgtttaaacacttaactatgaaaaactctggatataagtctttaactcccttcttttgtttgaagaaatacacacatacactctcttacatacaatactccagtcaggttagttttggctttcaaataaccatgaaacacttcaaatgaagatgaccgatccctcaagaaagttttcagcccatctgttgtcattgctttgacaaaaaatcaccacatcattttgtttttctattttttgtttcatggccctctttatctgttcattaattccctggaaataaaggcctgtctttgacattacaatcacacctgacttagaaagttacacatagcagatgctttctttccattaacatacttgccatcattttattgcttacttttcaccatgtatattatttctccggaacaaaatgtatgtaattaggcttaatatgtatcaagtatgcagtatctattgatatcagtgatgaacaaagcagaatgcaataggttaagaattatctcaagaacaaaatactacaacatataacaaaaacttgaaactagcaatgatatgtttaaaattatattaggctcaaatgttaattcaaattacataactgccctaacattcatttacttgataaagactctaaggacttaattggccacaagcacaacagtgatgaagttgttaaaaatgcaaatgttcactcagattacattaacggaaatttaactttcctaggcaaaaaggaaaaatggctgcaatggactgaatgtttttgtccccacaaaattcacatgctgaaatcctaattatcaatgtgatggtattagaaggtggggcacttggggggtgattatgtcatgagggtagagccctcattaatgggatgggtgcccttatgagagagaccccaaagagctctctcattctctttccactatgtgggactataacaggaagtagtcagtttgcaacttgcaagggggccctcgccaaaacttgaccatgctgccatccagatcttgggcttctaagaactccagaactgtgagaaataaatttctgttgtttataagccacatggtctatggtactttgttataggaacctgaactaagacaatgttccaatgttttttgcatttatcatagcactgcagaggaactgtatcaaatccttggggcctgtttagaaggaacattgaaggaatccaattgaatggaatctggaaagtatgtcacatgaaaagtgggactgaggtgagacatagtaaatattcttagtagtctcagctcgtggcagcctccccgatcttctggaaagtcaccacaagctttcatttacctgggaatcttcacagtcctgcccagagtgtgttttctctcattctttgtttgtccaactctttatttatcctccaaatctttgttagaatattactttcctggagaaattacctcagatccacacctaaactagtctcctacacgttcacagcgtattccctaacttgaccctcacaaggcctgttccaatttagcatttaattattttgtgattcttttacatcttcctccattcccactacactatgtctttcatgatatcagaaaccaactccaatttgttcaatgctatattttatcaaacacctagcagagctcattagggtggcagcaaattacccatatgaagaaagaatccactcatgcataactgtctaagtcagagagatataaacctcaaaggcaaatcttttattaccagtaaattaatgaatagatgaggagagtcatgaaacaaaaatatcaggtgtagactttagcaaactgtctgaaaagagtcctgggaaatcaattattattgtataaggaaatgaggaaattgaacccgaaaacttactgccttaccaagttcatacaactagcaagtgacagggggtgcattagattctcaacaactatttggtgaatgaatgaattcacaagataagttaccgctatcaagacacagggtagacacatgttctcaggatctcctgagagctcgtcatggaacaaatttttttttaagttgtagagcatttctatgtataataatgttcttttgctttcaacaaagttactttttataacatcaatatattagtcctagttttatatttttgaaactaaaaaattgattctcttttctccatgatctcttcaattcatttcattcattcattgaaccaatatttattgattataccaaatatcaaatgttattttaagaacagagcacataaagacatcaagtctgcctccagggagcttactaaggaacaaatagaaaatcatcatgtaaatgtaaaatgaccacagtgctatatatttcataggagagaagctgcgggagctcataataggagaatttgacctcataagagtgagtagaaagataaaaggcatacattttaagtagtcagacagaggaggaaaatgcattctaacagaagcaatggtatgtgcaaggaccctgtagcaggaagcacaatgtgtgtgaggaactgagaaaaagtccacgtggctgaatcagagaatgtgaacagtatgtggtattgtgtcctgaactggtgggttcttggtctcacttacttcaagaatgaagctgcgaaccctcgcggtgagtgttacagctcttaaggtggcgcgtctggagtttgttccttctgatgttcggatgtgttcggagtttcttccttctggtgggttcgtggtctagctggctcaggcaggagtaaagctgcagacctcgcggtattatagctcataaacgcagtgtggacccaaagcgtgagcagtagcaggaattattgcaaagagtgaaagaacaaagttcccacactgtggaaggggacccgagcgggttgccactgctggctcgggcagcctgcttttattctcttattggccccacccacatcctgctgattggcccatttcacagagagcccagtggtctgttttggcggtgctgattggtgcgtttacaatccctgagctagacacaaaggttctccacatccccactagattagctagatacagagtgtggacaggaaggttctccaagtccccaccagagtagctagatacagagtgtcaattggcgcattcacaaaccctgagctagacacagggtgctgactggggtgtttacaaaccttgagctagatacagagtgcccattggtgtatttacaatccctgagctagacataaaggttctctaccgtccccaccagactcagaagcccagctggcttcccccagtggatcccgcaggagagctgcaggtggagctgcctgccagtcccaggctgtgcgcccgcactcctcagcccttgggtggtcgatgggactgggtgcgtggagcagggggcggcgctcgtcggggaggctcaggccgcacaggagcccacggaggagcggggggaggttcaggcatggcgggctgcaggtcccgagccctgccccacgggaaggcagctaaggcccggggagaaattgagcacagcagctgctggcccaggtgctaagcccctcactgcccgggccggcggggtagccggccgctccgagcgcggcgttcgcggaggccacgcccacccggaactcgcgctgacccgcaagcaccgcgcgcagccctggttcccgcccgcgcctttccctccacacctccccgcaagctgagggagccggctccggccttggccagcccagaaaggggcttccacaagtgcagcggcgggctgaagggctcctcaagtgccgccaaagtgggagcccaggcagacgaggcgccgagagggagcgacggccgtgaggactgccagcacgttgtcacctctcagtatgagttaagcctggagatataggtagggtccaatccatgaaaggactcttaggtaactccaaagatgctaagagcaatgagaaccacagggaagtctaaagctacaaaacaacgttatcagatttacattttgtaacatgttgctgtgatagatatttggggaatatagggggcaaagagcagaaatagagagataaccagttgttgccgccagcaaatatgatgatagcttgaatgtaagggcattagagagcaaaggtgaactgatttaatacagtattgaaaagtaaactaaacacgatttgttgacagtttggatgaaaagggaaaaaaaggaaaagatttttacaggttgattgtaaaaatgtaagcagtggtagagtcctctagtttcttatcccaatattcaccttctccctttcttcttaacaatagaacctgaaatttatttgatgtgccaggagatccagataagatctatgtgtttctgtctcactttcagctatatatggtcgtgcatcttgctgacgactgaccagtaaaatataagtggaagtgttggggccttctgacatgtttcctttaaaggatgacatcaagaccttattcttttttttctaaacccttctatctagaaataaaatgtgaaattgtaactttagtagtcaacttggaccatgtcatcccaggcctgcatacctttagcctttatttccatgagaaaaatgaagctttttatgtctaaatcatctacagccaagggaatttgctctaatacacaggcataatccactaggtaaataggagtgccattgactgggagggagaaagctagaggaggtccaggtaatgaagaaaaacagcaagagtgaagcatggtaagtttgagatgcttcaaacacagccaagtaggcagtcatataaacaggtctagaattcctaagatatatacggattaagtgtagagatttgggattcactgacatatagagggtacttataatcatataagaaaatacagcagatctataaacttaatgcaaataaaatctagatgcctttccatcagaaattgaaaactggatcctcaaattcatatgaaaatacaaagatcccagcatagtcaaagcagtcttgaagaaaaatgtgagagttcctgattctaaacttagtacaaaactacaaaaataagatggcatgatattggcataaaaataaatatatcaaccaatggactagtattcagagtccagaaataaaatccttacatttgtggtcaattgatttttgataggggtacagaagaaaattcgtgaatagaagttagcaaaaagtagatcctagaaccaaagataagagctaaaactatgagacccttagaagaaaatatagaagtaaaactttttgacattgttaatcaaaaagacttagatataacaccataagcacaaggaaaaaaaggaacaaaaacagataaatcatacttcatcaaggcaaatcacatagataataaagaacttgtactcggaatatacagaatctatgacaactcaataataaaaacacaaaagatgtgcctggcatttctccaaagaaggcatacaaatggccaataagcacatgaaaacgttactcattagggaaacacaaatcaaaaccacaatgagttaccccgatttgattattatccaatatatacatatatcagaacatcacattgcccccataattatgtacaatttttatatgctaatcaaaaataaaatgtaacttaaaaaactttttaaacttttgtttttatttttgtgggtacattgtgggcgtatatatttatggggaacatgagatgttttcatacagccatgcaatgtgtaataatcacatcatgtaaaatggggtatcaattccctgaagtatttatcttgtgtgttacaaacaatgcaattatactgttagttatttttaaatgtacaaataaattacagttgactatagtcactctattgtgctatcaaatactaggtcttattcattctttctaatgatttttttgtacctgattaaccatccccatctccttccccgaaccccaacctctctctgcttttcccattctctggtaaccatctctctgctctccatcttcattagttcaattattttgatttttagatcccacaaataagtgagaacatgcgatgttcgtctttctgtgcctggcttatttcacttaccgtaatgagctctagttccatccatgttattgcaaatgacaggatctcatttactattattattatttttatactttaagttctgggatacatgtgcagaatgtgcaggcttgttacataggtgtacacgtgccatggtggtttgctgcaccagtcaattcatcatctacattaggtatttctcctaatattatccctcccctagcaccccacccatgaacaggtccctgaaggagatcggttagggtggtgggataaatttcaggaaagatacaaaccttcttggaaggccgggaggttttgcaaaagcttcagaaggaaattatggctgaaggcagccaaattctcttatctggagcctgagagcaaaggctaggaatgtaacaagggaatgtaaaggaactgatctggataaatttgtttactcctgtcttcagaaaccaacctttgatcatttgcatgcaagactgctctctactcagggggtcaacaatgttaattacctacaaattgtgtttgttccaagcctttgtcattaaatctatactaaataaaggtgaacatcgctggcttaaggggactgctgactgtcttcggcccctagtgccggcagtcccctagcccactttttcacagtcacctgtgtctgagtactactgtcatctgttgcttggccagagtctgtgggacagacttggcagcaggccctggtgtgtgatgttcctctccctgtgtccatgtgatttcattgttcaactcccacttatgagtcagaatatgctgtgtttggttttctgttcctgtgttcctttgtggagaatgatcgtttccagcttcatccatgtccctgcaaaggacatcacctcatcctttttttatggctgcatattattccatggtgtatgtgtgccacattttctttatccagtctatcactgatgggcatttgggttggttccaagtctttgctattgtgaacagtgctgcaataaacataggtgtgcatgtgtctttatagtagaatgatttataatcctttgggtatatacccagtaatgggattgctgggtcaaatgatatttctaatcctagatgcttgaggaattgccacactgtcttctacaatggttgaactaatttacactcccaccaacagtgtaaaagctttcctatttcttcacatcctctccagcatctgttgtttcctgactttttaatgattgccatcctaactggcctgagattgtatctcattgtggttttgatttgcatttctctaatgaccagtgatgatgagcttttttcatatatttgttaaccacataaatgtcttcttttgagaagtgtctgttcatatactttgcccatttttgatggggttgtttgcttttttttcttgtaaatttgtttaagttctttgtagattctggatattagcccattgtcagatggatagatagcaaaaattatctcccattctgtaggttgcctgttcactctgatgatagttccttttgctgtgcagaagctctttagtttaattagatcccatttgtcaattttggcatttgttgccattgcttttggtgttttagtcatgaggtctttgcccatgcctatgtcctaaatggtattgcctaggttttcttctagggtttttatggttttaggtcttacatttaagtctttaatccatcttgagttaatttttgtataaggtgtaaggaaggggtccagtttcagttttctacatatggctgccagttttcccaacaccacttattaactagggaatcctttacccattgcttgtttttctcaggcttgccaaagatcagatggttgtagatgtgtggcattatttctgaggcctctgttcttttccattggtctatatatctgttttagtaccagtaccatgttgttttggttactgtagccttgtaatatagtttgaagtcaggtagtgtgatgcctccagctttgttctctttgcttaggattatcttggctatatgggctcttttttggctccatatgaaatttaaagcagtttttttctaattatgtgaagaaagtcaatggtagtttgatagggatagcattgaatctgtaaattactttgggcagtatggccattttcacgatattgattgttcctacccatgagcatggaatgtttttccatttgtttgtgtcctctcttatttccttgagcagtagtttgtagttctccttaaagaggtccttcacatcccttgtaagttgtattcctaggtatcttattctctttgtagcaattgtgaatgggagttcactcatgatttggctttttgcctgttattggtgtataggaatgcttatgatttttgcacattgattttgtatcctgagactttgctgaagttgcttattagcttaaggagattctggcctgagacgatggggttttctaaatatacaatcatgtcatctgcaaacagagacaacttgacttcctctcttcttatttgaatatcttttatttctttctctttcctgatttccctggccagaacttccaagactatgttgaataggagtggtgagagacagcatccttgtcttgtgctggttttcaaagggaatgcttccagcttttgcccattcagtatgatattggctgtgggtttgtcataaatagctcctattattttgagatacgttccatgaatacctagttttttgagagtttttagcatgcaggggtgctgaattttattgaaggccttttctgcatctattgagataatcatgtggtttttgtcattggttctgtttatatgatggattatgtttattgatttgcatatgttgaaccagccttgcatcccagggatgaagctgacttgatccaggtggatcagctttttgatatgttgctggatttggtttgccagtattttgttgaggattttggcatcaatgttcatcaaaggatattgatctgaaattttctgtttttgttgtgtctttgccagattttggtatcaggatgatgctggcctcataaaatgagttagggagaagtacctctttttctgttgtttggaatagttttagaaggagtggtaccagctcctctttgtacctctggtagaatccagctgtgaatctgtctggtcctgggcttttttatttttatttttttttggttggtaggctattaattactgcctcaatttcagaacttgttattgttctattcagggatttgacttcttcctgatttagtcttgggagtgtgtatatttccaggaatttatctatttcttctagattttctagtttatttgcatataggtgcttatgtattctctgacggtagtttgtatttctgtgggatcagtggtgatagcccctttatcattttttattgtgtctattagattcttctctcttttcttttttattagtctggttagtggtctattttgttaatcttttcaaaaaaaccagctccaggattcattgatttttttgaagggtttttcatgtctctccttcagttccactatgatcttagttatttcttgtcttctgctagctgttgaatttgtttgctcttgcttctctagttattttaattgtgatgttagggtgtcaattttagatctttcctgctttctcctgtgggcatttagtgctataaatttccctctaaacactgctttagctgtgtcccagaaattctggtacattgtatctttgttctcattggtttcaaagaacttctttatttcttccttaatttcattatttacccagtagtcattcaggagcagtttgttcagtttccatgtagttgtgctgtgagatttttaattctgagttgtaatttgattgcactgtggtctgagagactgtttgttatggtttccattcttttgcatttgctgaggagtgttttctttccaatcatgtggtcgattttaaaataagtgcaacatggtgctgagaagaatgtatattctgttgacttggtggggagagttctgtagatgtctattaggtctgcttggtctatagctgagttgaagtcctgaatatccttaattttctgtctcattgatctgtctaatattgacagtggggtgttaaagtctcccattattattgtgtgggaatctaagtctctttgtaggtctctaagaatttgctttatgaatctggatgctcctgtattgagggcatatatatttaggatagctatctcttcttgttgcattgatccctttaccattacataatgtccttcgttgtctccttttatctttgttggtttaaagtctgttttattagagaccaggattgcaacacctgatttttttttctttccatttgcttagtaaatattcctccatcctttttttttttttttttttttggagatgaagtctcgctgtgttgcccaggttggagtgcagtggcatgatctcggctcactgcaagctccacctcccaggttcataccattctcctgcctcagcctcctgagtagctgggactacaggcacccgccaccatgcctggctaattttttctattttttagtagaaacggggtttcaccatgttagccaggacggtctggatctcttgacctcatgatctgcccacctcagcctcccaaagtgctgggattacaggtgtgaaccacacttcatccctttattttgagcctatgtgtgtctttgcaggtgagatggtctcctgaatacagcacagtgatgggtcttgactctttatgaaatttaccagtctgtgtcatttaattggggcatttaacgcatttacatttagggttaatattgttatgtgtgaatttgatcctgtcatgattctagctgtttattttgcctgttagttgatgcagtttcttcatagtgtcgatgaggtttacaaatttggtatgtttttgtagtggctggtaatggtttttccttttcatacttactacttccttcaggagctcttgtaaggcaggcctgatggagacaaaatctctcagcatttgcttgtctataaaggagtttatttctccttcgcttatgaactttagtttgactggatacgaaattcttggttgaaaattctttgctttaagaatgttgaatattggcccccactctcttctggcttgtagggtttctgcagagagatccactgttagtctaatgggcttccctttgtggataacccgacctttctctgtggctgcccttaacatttttttctttcatttcaaccttggtgaatcgacgattatgtgtcttggggttgcttttctcaaggagtatctttgtggtgttctctgtattttctgaatttgaatgttgatctgtcttgctaggttggggaagttctcctagataatatcctaaagagtgttttccaacttggttccattctcctcatcactttcaggtacaccaatcaaacataggtttttgtcttttcacatagtctcatattgcttggaggctttgtttgttcctttgcgttctttttttctctaatcttgtcttcattctttatttcattaagttgatcttcaatctctgatatcctttcttctgcttgatcaattcagctattgatacttgtgtatgcttcacaaagttctcatgctgtgtttttcagctccatcaggtcatttgtgatcttctctaaactggttattctagttagcaactcatctaaccttttttcaaggttcttagcttccttgcattgggttagaacatgctcctttagctaggaggagtttgttattacccaccttctgaggcctacttctgtcaattcgtcaaactattttccatccagatttgttcccttgcgggcaaggagttgtgatcctttgcaggagaagaggtgttctggtttttggaattttcagcctttttgcactggttttcctcatcttcgtggatttatctacctttggtcttagatgttggtgagcttctaatggggtttctgtggggatgtcctttttgttgacgttgatgctattcctttctgtttgttagttttccttctaacagttaggcacctctgctgcagttctgctggagtttgctggaggtccactccagactccctttgcctgggtatcaccagcagaggctgcagaaaagcaaatgttgctgcctgttccttcctctggaagctttgtcccagagggacacctgccagatgccagctagagctctcctgtatgaggtgtctctcgacccctggtgggaggtgtctcccagtcaggaggcacgggggtcagggacccacttgaggaggcagtctgttccttggcagagcttgactgctgtgctgggagatctgccattctcttcagagctggcaggcagaaatgtttaagtctgctgacattgcacccacagcctccccttcccccaagtgctctgtctcagggagatgggagttttatctaaaagcccctgactggggctgctgcgtttctttcacagatgcattgcgcagagaggaggaatctagagaggcagtctggctacagtggctttgctgaactgtggtgggctctgccaagttcaaacttcctggcagcttttcattttggttttgatttgtattattctgacaactagtgaggcagagcaccttttcatatacatgcttttcatttgtatattttctatggtggagttgtagtttcaaatttatccaaacaaaaagtacacaaaagaaaacaaacacaaatctctaggtccatttagttttactgacaaattctgccaggcatttaagaaagaaagaaagaaaaccaatctatacatcctcttccagaaagtgaaagtagaggatatgcttttgaaatcatcctatgaggccagcattatcctaataccaaaagcagatagaagcattacaaggaaaaactgctataaacgtttattgttcacgaatatagacacaaacattcataacaagtattgacaaataaaatttagtaatatatgaaaagcataacaaatcacaattagtggagtttatcccaggaatgtaaggtgagttcatcattcatcattcagtcattgcaatttaccatattaaaattggaacattagtacatgcaggaaaagcctacaataaaatctaacattattaatgaaacgttcacatatattaacaataaaaatgctttcaaaatacattcttatattctaataagagatatgtataaaaaaacctacagctaaaataaaacttagtggtgaaaaactaattgattttctcttaagctctacaaactttggtctttgatgttggtgagctttggatggggtttctgtgtttacgtcctttttgttgatgttgatgctattcctttctgtttgttagttttccttctaacagttaggcccctctgctgcaggtctgctggagtttgctagaggtccactccaaaccctgtttgcctgggtattaccagcagaggctgcagaacagcaaacattgctgcctgttccttcctctggaagcttcgtcccagaggggcacccaccagatgccagccagagctctcctgtataagatgtctgtcgacccttgctgggaggcgtctcccagttaggaggcacaggggtcagagacccacttgaggaggcagtctgtcccttaggagagctcaagtgctctgctgggagatttgcttctctcttcagagccggcagacaggaacgtttaagttggctgaagctgtgcccactgtcacccctcccaccaactgctttatccatctttctgttgataggcacttaggttgcttccaaattttggctattgtgagcagtactgcaacaaacatggaagtgtagatgtcttttagatatacggatttcctttcttttgtgtatatacccagcagtgggatttcaggatcaaatggtagctctatttctagttttttgaagaactgccaacctgctctccatagtgcttgtactaatctacattcccaccatcagtttaagagagtttctttttctccacatcctttccagcaattggtattgcctgtaaaaaccgcaatgaaaagccacttcatactcactagaatggctataatcaaaatgacagacaataacaagtgttggcaggatgtggagaaattggaaccctcataccttgttggtgggagtgtaaaatgatgcaaccaatattatttgaagtcagtctggcagtccttctaaaggttaaacatagagttaccatatgagctggtaattccactcctaattgtatacccaggggaaatgaaaacatatgtccacaaaaaaaaagtattcacaaatattcatctcgagcattattcataatagccataaagtagaaacaacccaaatgtccttcaatcgatgaatggtcaataaaatgtgttatatccatatgatcacatattgcaattttattcagcaagaaaagtaataaagtgctgatacattctataatgtggttgaacattgaaaacatgaaaaataaaagaagtcaggcataaaaaatatacaaaaaactgtattaaatgattttacttatatgaaaagtccagaataggcaaatctatagaaacataagtagagtagagcttgcctagagttgaggattgtgggtgtaggaaagatggatagtgatgctaaatggatatcgaagtttctttgtgggatgattaaaatgttctaaaattatatagtggtgatggtagtataagtctgtgaatgtgctaaaaatcaccaaactataaatgtgaagttggtgaatttcatagtatgtgaattaaatcttatatttttttattttattttttttttttttgagactgagtctcagtcactcaggctggagtgcagtgacacgatctgggctcattgcaacctccgcttcctgggttcacgtgattttcctgcctcagcctcccaagtagctgggattacaggcatctgcagccacacccggctaatttttgtttttgagtaaagacggggtttcgccatgttgaccatgctggtctcgaactcctgacctcaagttatctgccagcttcggcctcccaaagtgctgggattacacgcatgcactactgtgcctggccatgaattaaatcttaataaagtgtttaaaaatcaaaagaaaagaagctgacattttttgtccatcagactgcaaaaccctacaaccatatcaatgggcttatagttcctaagtgtgtaattcctccctgcctgggcctagaagctccctatctatccacattcttagccagaggtttcctcttcttatctcataatactatttgcctagttctcagagaccccagagtcttaactgtctctttctgcctttctgtcccagaaaattgtgatcaactacatagtagtgatgggattttatctcaggacttccagacatttaatccacatttctctttgaaatataattatctgtttgtaaaacattaatacaaaatcaaaacaaatatttaatttatactataaactggatatattagaataatcgtttgcattcaagttaatttattttacatgaaatttaaatgcatcttctaccttctgtctacaaatatttaaaatgcttataaatgaatcattaattaagacttgcactactctagggcttctaaactgatctttgtgtcacctctggcctatgcatacctatgtagttataatgtccaagtgcatggacttctacctaagcaccccctcaatctggaactgcatcaagatcacttgacttgttaaaacactgattgctgggccccactctcagggattctgattcagtgttctccaggtagagtgtgagattctgcatttctgactagttcgcaggcaatactgatattgctatacccagaccatacttgaagatcaaggggctacagcactagcccctgtatctcatactcaagcctcagtcaaagcttacatttatcactcagaggaagcttctgtcaaagcagttgtttaataataagttcacatatagcagtccatcatgttttaataatcgcatattactgcattacctttatatgatacattttggccttttgtcgtttgacttttacaattacaataaagaatgttaccaattataagatattgtttgcaatttataacaaaatagtgccctaataattcactttcaggtttttagttcagttaatcttaacactataaaacaagggtttttttaaaaaaaaaaaaagttaatacatgtaattatggtttcaaatgagtggaattttcttgactttttaatcaaaacaaataatataaataaactgaatgctgacacatttaatgaattaaatgctataactgctaaccataaaagccagtaaccaatatcaaacatatcattatgaccctactattattataatattattttaaaagtgatttttttatttgaattcatacaagaaattgtaggaataaaatgtcacattaacagtttcatataccaagttccctataaacttttatttttaaaaatgctctgtttgagaaagaaagatgaagagaggaaagaggacgggaaaggagaaggaaggaaacaaaaatcattgatccagagcagtgcttctcaagcatctcaagtattgatgtgctggggaacttatagatctttttgggatcctggtcaagtgcagattttgatttagtagggtctggagagggtccatgattctagcaagcttgtaggggatgctgatgcagcttatcactggatctcacattgcatagcatggatctagatcatcacatggcttcagaatcactgatggactatcaagagggagataagtaagcatagcattattggaatgggagtaggcaataaacagtgaagtatgttttctataacccactgaagagcacatttgcttaaaatgaaaatataaagttgaaattatagcaatcttattgtcaagatggttaaacacctattctgatagtgctcatccattcattcattcctgcaagaagcatttactaagtagctattgtatgtcaggaattgactgtaacattgtgttggatataagacaataaaaatctatagtgtgggctgtgctttagaaatgtgagcaaaatgtcatgagagtttacaggaaggtgagaaatatcctgtctaggacttgattactaaaaagcatcaattataatagagcgatcacataaattatactaattatatgaatttttctcaaaatgaccaccactaaatcaggacatttaattcttctggataaaatgcctgcagagcaaatcagaataactttagctcttagaaaatttattattaaaagagaaaatatatatcttttttttttttttttttttttttttttttgagacagagtctcgctctgtcacccaggctggagtgcagtggcaaaatctcagctcactgcaagctccaagctccacctcccgggttcacgccattctcctgtctcagcctcctgagtagctgggactacaggtgcccaccaccacgcccagctaatttttttgtgtttttagtagagacggggtttcaccgtgttaaccaggatagtcttgatctcctgacctcatgatccacccgccttggcctctcaaagtgctggaatgaaaatatatatcttataacttagaaacacacacactttttagaacaatataccagctgattcctgttgcaaaaagggaatattccaaaaatcagatcacaaaagtgattgcatttatgatgattaaatatataactacatttcaaaatatattgtaatgaacttctatcctctaacaaaacatgatatagcatgccatttttaatttacttgtcaatcgatcatactttttaattttataattttacaaccatttttaaattttgtaattctataattttacttttataagtaaatagcatctgttctcagtttaaattatatttatacagtttggatttgaagactattaaagattcaatttaaataatctaataaaactttattagtaatacaaactactacttaaaatacattatcgcataccatgcaagtattacataatgatttttgaatactaattttaaaagtcagattcattatttactcacttattcatctcataaataaaaatattttatgacattgttctaggtaacagggatacaggataatgaaaaaaggaaaaaaaatcctgtcttccaggagcttatgtgattgttccagaggacattaagtgagtaagtacaagcagctgcttatatacagggaacacaggaagggctgcaagggaaaggagttgtaatcataaatggtgtggtcaggaaagttctcactgagaaagtgacattggcatatgtgtgtgtgtgtgtgtatgtgtgtgtttttgtgcgtgagtctatatataatattaataataatatatatacacaatattagagatacagagcttttaagaaattggctcacatagtcatagaggttggtaagtctgaaatccataggcaagtgggcagtctgaaaattcaggtagaaattgatgtggcagtcttgaatttggaggctagaaactcaggtagaatttatatgttaaagtctggagaaataattccttcttccttgggaaacctccatctttgttcttaagatcttcaactgataggatgagaaccatctacattgtggaaggtagtttgccttacatgaagtctgttcattgtaaatgttaatcacatctacaaaatacctttacagcaacacatggactagtgtttggccaagcaactgattactatagcctagccaagttaacacactaaattaacaattacagacagtgaaaagaaagatatagggttgtagctggaggatggtagattgtttaattaatatttcatgtggaaagttcagcctattcaaagaacaatgggaaggatccaggctaaatatttaagggagaaagggataaataatccaagttaataaaatgactggaaaagataagatataaaagccaggttgagggataggacttaattggaagtgatatcatctgacgctaacggagaagaggggttagacactgagaagagtggagctatttgaaatgaccctcatgaagagtaaaaagaataagatgaccataaatcgtaacaaaatggccaggaaaatggaactattgagactggtgaccaggaatgtgtaattcatgaaatagtatagcatatctgccatgtggatctgttcagatgtaaacacaaagatggcaattaaatggggacaaaattaagatattccaatgtaaatatggacaaaagagccagtgccagctgggttactggcaataatattattgcaataacaaatttgggagtataagatttaaatggagagaaataaaggaaaaaatgagtgaattgaaagaaagaatggataggggtctattgagagagagaataatgacagtgggtcatggttcaagttgggcagaaaattgggaaggagacaacattgtgcttagtgtatgactaagaattcatgaaagttgagcagttcaaggtccagacaaagttcaaggagtgactgtgggaaggggcagctaaggcaacttggaagggatgagtataaggaaagatatgtggatgctaaagaattgggatgaagaagaaatctatggaccagttgcccaagtctttgataaatgaaacgagtgaccaagatctggatagaggacaaaaccagaggatggagaaggtgctatgccagggtagcatgagttcaaagtggcaatgagaagcaaggtgtataccaatacacctccaaactcagaggcacatagagccagagaaaagaaatgtcactgctttaagaggcttacaaggaaagaagtgccctttgaggaattacaggttatattcaaggcaaggaggtggaagaaactccatggtgaaaaaaccttttccaaacttaaataacgttcttctcaaagttcctgagagttcatctttccctattcatatgtacctcatttagtccttagtcaccctctctcactctctcacatccctaacgatcacatattaatctctgtgggcttcttcgtgattgttttgtccaattttatctggtattagtattttctcatcacatgcccatctgaagatgttgtcttctttcttaacctaagtacagaaatcggatcatgccctcaacagagtgattccactagaattgctgctgctgatccagctgccttctaatgatttgatttagaaaaatataataaaataaataaaataaatgcagagtccaaacaaagggcaaaaagaaacccaggacccactctgacttacacagctattagcatgtctctcagaaaggtctttttcaaccaaataccaaaaccctgagttcttttgcacagcttgtaagcaaatgttagcgtgtggattcgatttacatcttcctcgcaaagaaagaaaataggttgtgaggcagaggagagagaataacaaagatttattttgtagaaatggaatcaccactgcctggttagagatggacttgactgatgagttttccgtgatagcctcccagcacttaatcttagccaaatattaatgtgctgaatttattacagttgagctctgaaattaaaaatgaccatctgtggcacatgtgtgtggtacgtagaacagtaatatattgtaggccagcccaacaagacacaaaggatatcgtgattgtgacaaggtgggaaaactcactcaaacaccaagacagttcagtgaatctagtggacactggtattggtcctctctgcaggtatctgctttctgaaacaatgcacgacatatatgagatatttattaataattccttcaacatacctctataacagatggtgcgctctaaatctggaaatgcagtttgcttcactgaaacagagcaatcaattgaacaacaccaaattctagaggaaaagatcacaagtgtcagacaaaaagaaagtagtttttgttattgttgttttgttttgtggagatcaacactgtaatgaagctcaacactgcaaagttggccctctagaattttcatgtgaatgtcaggatcaaattaggaaagtgtgtatatacattttttgacatatatatgtatataaatatatgtatgcatatatacaaagacataaatatagagcattttctctaggaaatagaattcaccagaaattagctcttcctacaaagagaacaggatttatattttaaggctaaagatgaaaaagcttaatagaaaacttattttgtgactttttatagaggaaacccttataggaaaataaaaggatacatttgactagaagtgggaaccacaaagcatagataaatatatttattttgaatgagtttattcatactttgaattatctgggtccaaagaatagaaaacaattagtttacaagtaatcttgttatgccatgtcctatgtatcgtaacagaaattaggctataatttgtgtggttttggtttgtgcatacatgactgagtttagttcgtttggtgagttgacagctagacaagatagtatcagagttctaaagtattagtgacttgataataccttcacagtccaaatgctgtcctattagttacctgggtctcttcatgggattcttaaaaacattctgcagaaggaaaattagtggactaggaataaaaatatttccttattactagctgctcaatacctttgatattgtcaagttagtgattttcacactcagaatgttctggaaaaagtcagaaaggactggatacccagaaagatgtgacatgcaatatccacagagcagaacaaaccagaattgctttggtattttacattattcaatatcctttcaattgtaagtgatttaaacccaattcaaattgagcaaaaaatatgaataggccacgagaaatataaatgaccaatgaagcaatgaaaatatttcatacttcgaaagaaattaaaattgaaacaatgagcaatgagatctttttatttctaaaatgtgcaagctattgatacaggttaagaagaatggccattttcatgcaatatggtatgaaatgttttcagaaatcaatttgtctagaaaatgataaaacttacaaatgtgtcctgatgtttattcatttagcaaataatttattgagtgattattatgtgccaagcactttgtaaaatatctacctctcacagtggttatgatctgtaagacaagatacacattacaaaaaatataggcatactaataaagtaaacaatgtaaaactgccattttggcaagcactgagaaagatctatgtggacttaaaagtgcctaataaaggtaaattgggcagtcccagaattttgggaaaattttctagggtgcagtaagccttaaagaattgagtaagtaaatgtttactagtaaaggaagggaagtggcaggcaaatgtaataatatgtacaaataacataaggaaggaaaaggaatgaagcacataaaggtcagtgtatcagtcagggtaagccatgctttgctgcagtaacaaacaagcctaacatttcagtgatttaaactaccaaaatttttctttctttcttccttccttccttccttcctccctccctccctccctctctctctctttctttctttcttctgttctttgagaaagagttttactctcatcgcccaggctgcagtgcaatggcacgatctcagctcactgcaacctccacctcccaggttcaggtgattcccctgcctcggcctcctgagtagctggcattacaggtgtgtgccaccacacttagctaatttttgtagttttagtagagacagggttttaccaggttggtcaggctggtctcgaactcctgacctcaggtgatttgcttgcctcagcctcccaaagtgctaggattacaggcatgaaccaccatgtctggcccaaagttttattttgtactcacattttatagcaattgtgaattgacattgctctaatcagctctacttctcattcctctcactctggatccatttgataaatcagcctctgtctagaatattatcagtcacgatggtaagaggaaaaggctaaaaggcctaaaggtcattatgttaagtgaaataagccaggcacagacatacaaacgttgcatattttcacttatttgtgagatctaaaaattaaaacaattgagctcatggagatagagagtagaagagtggttattagggctgggaagggtagtgagggtatgggggaagtagggatggttaatggatacaaaaaggaattagaaagaaaaaataagatctaccattgaatagtacaacagggtgactatagtcaaaaataatttaattgtgcattttaaaataactaaaagagcataactggattgtttgtaatacaaaagataaatatctgagaggatggatgcccttttaccatgaagtgattattatgcattgtgtgcctgtgtcaaactatcttatgtactccataaataaatatatctactatgtaactaaaaaaaataattttttaaataataataagactagtcatgggacctcaacaaaagggcccaggaaatgcactcctactaggtgcccagctggaagaaagccaaactctcaatgaatagactaatcatatgtccagtgtggctggaactgagtggaggaaatatgagcccaagtgagaaaacctgactttattctatagccaatgtgaagtcactgaaggctttacactttcaagaatttttcctgaggagaaaaattacttagttatgtaacatttaatttacaagctggtttatcatagtagtgtttattaattttttcaaatggccaataaacctaagtattcaacaggaagtcttactcaaaagtcagttgctgtatctttataataaaataggatataactagaagtaatgggcttcgaaaaaatgtgacatgaaaaacatatattaactgaaaaagtatgcataaaatgcagtataaaataagatctacttaatttatctgctcaatatttttaatattttaaatatacatttaacatatgtgcatcaaaactcttagaagtactatatagattacatatattttatcagtaattatttaagctagaatcatgatgtgcttgggttttacttttgttgttgtcattttatttgttattacctgtgctttatttacgtctaattttttacaaagaatgttattccttattagtagaaattttttaactggccaggactctatttgtgatcattaaaaaataaataccttttctcttttctttttccattagaaaacatgactgcactttctgtagtcgcttgtaaattgcataaaagttatcaacatgttgtttttcttcttgttttaagtcatctgaacactgaaaattgtgtatacattagcactagctcagacgcagcctctagtaagaggaagtttaacatctattctcatcttttcaattgcctcttgccatgagcggccccgcaactcaggttccggatccattgttagtctgagacaatgaaatggcaagtttttacccgtccaaagtaacccaatatttttgagatcacaattctagagaccagtcaaacactccaaatttatcaagcgataatgacttcaggagaatattccctgccttctcttttttggcattcttttgattatggtaaaggatggttgtaaccaccagtaacgattcaagaataacacaggatatgtgtcactgatgctttaataagagcatatatattgctgaaaaacaggctgccttattgtatattcttactcaatcactggacattttacagcagtaaattctctgatttttcaagaaaacatttgacgcaaaaactcaaaccatatttcagctctttttcagctgccaaaaaagtaaataatctatttagccagactttgcagacattggccaaatgttggcctgaactctgagcgtatacctggatgggttgatacatctgacacaattgggttaccacaaactgggctgtacatgaaaggtctgaagaaatttaaaattagcctggggtagaaatattccaccagaaagagtattggtgaagaggaagatttggacttcttgtagggattgttttgtagctttgtcgcaaataagtatgtttttgttctttaaaggggaaaaaaagttaaagaatgagataagagtctcattacaatccttgaaaaccagcatgttgtttatccaaattacctatttgtgaattcccatccatggggacattgataagtgccatttagatctcatgactcttcactgtactttgtatatcaaggggaagttctaattaaggtaatattttataataaaaaaattgttattatttgttttttctgttgagctatagctggtgcttcttctcacctagaggtctcctattttgatctagtgaatggaagtaggatttgaaataaaattaaggtcaaaatatgaaaatatgaaaagtatttactgtgcaagtggcagattatactttttcaacaaaatcatctttgaaagtactggctaattcctgcttgagaggtacaagtaaagcggcagccaggaattctaggaaatattctgcaaaatatgtccaaaaaagcaccaatcaatgtaaaagaagttaattaaaacttgagtcagtaagaaaaataaatggtggaaaaggcaagtcatcaatcactatttctattttcttcatctcaagagaagataaaaagagcagaggaaaataccaagaaaggattcaagtctgattaactccaccaaatatttatttagaggctactctataaaaacatagatgtacttcctcaagtgagaaaaaatctatgataaacaaagtccttttactagaatctctaaagcgtaattagaaataggtgaatctccggtggctcacacctgtaatctcagcactttgggaagctgaggtgggcagatcatgaggtcaggagatcgagaccatcctggctaacacggtgaaaccccatctctactaaaaatacaaaaaaaattagccaggcatggtagcaggcacctgtagtcccagctacttgggaggctgaggcaggagaatgacatgaacccgggaggtggagctcctagtgagccaagatcccgccactgcactccagcctgggcaacagaacaagactccgtctcaaaaaaaaaaaaaaaaaaaaattggtgaatctcagcgatgtgataagagtggggagatcgtcagcacctcctagggacatcaagacaaatcccggttgggctggtgtcagatgctattaagaagtagtaaaaaggctaaaatctagttatagtagcagaagtagtgttagggtatggccagggtcagatatcaggagaacccaaggccacatcaaactctagtgggcagatgagagcaacagttaggtatgaatcaaggcccttagaagttatcaaaatgagtagtactggaaaccagcgtatatatactgtctttggtggtggttggaattgagattctgcgaaaagttaggtctccatctggatgagcacaacttcataaggcacaacactccaagtttatctatcaccaaacacagtgattaaatttaaatgtttatttctaatagatatttctacccaacaaggcaagtgtagaagcctccattgtctgagcttgtcaattgcatgcctggtctcatcatggccttaccactggcctaaacccactgaactctcctgatttatgtatttatattcataatttccaataaatttctttagctttgcatttctcataacatcctgtatatgtgtgtataaaattaaactaaaaatcctttgtgatagtacaaatgaataatgtcaagaaagctcagatattaaccccaaacttttagaagataacatctacattccctatttcccttaaaaatcttaccatcagtaattaacataaaatcagagacttcaagctggaagttaagaggtcatctgtgacagttttattaaatgtccacaaattttggacactctttccttcaaaagtgggattacatctctctttcatccatctttgtgggcttctgactcacttgcaaatggtcaaaagaggtagcacaatttctgaggctatatcatagtgggtaatgcagcttctgtcttgagcgcagggacacatgcttttacttatatccatgagcttacatataagaaccctaaatatcctgaagaaactataatgtgcagaagttgaggacacagaaaaaaatcacatatacatgctccagtggcagccccagctaatctctcagccaagtgccaggaaaacctgagtgaggtaccttggacattcagtccagtaagccttctttatatggttgcaactacaggcaatatatagctgcaactgcatgagacacgccaagtgagactacccaggcaaacccttctgaattcctgacccataaaagctaaggcaaaataaatttttaagcctatacatttagaagtaatttgttatacagtgatagataactaactgatataccatctaatccaagtccctactctgggatgaatcttttggattaaatgactctaatgcaaggtatcttccttcacattagccatgaaccaatagttttggacaacacaattttgttcctcatgttagaccaaaatcttcatttctctaactttaaaccaatatcctagattagcattctctggcttcttaaacatgaaagcttgccacgtagacaaaagcactctgtaaatatctccttggtcttttctcctgaaggaaaacaatacccgtttacttttggccttgcctcaaaagatagaattttcaaaattctgtgtgtctttttctgaacatattccaatcggagaagtcttaaaatatagtgtaacgagtttgacacttcatcccataaatcatctcacagaatttggtgaaattgtcttttctagggcctctattgtgctagacacaatatttcattaacgcaacccatgattgtgctggtctatttttttaacagccacatcataccattggcttattttatggttgtcatcaaatggaaatcccagacctctgccatctgtactgtggccaaacaagctcactcaggcagctgactttctgaacctaaacagaacttgaaacttgtttctgcttaatctcatttcaatggttttggctcagtgtgttgctgtcagttgacgacttttattcttgagtctgtcacttatagttttagccatctatgcatcctcacatctaaaactctatcaaaattatccatagaaatactgagtcaacagggctaagagtatagccagtcaaactccattagaaaattacagagccatttgccaacacataacaggcatatgtttagacactaaatatcaacacttctatcattcaatctactatttacgtatgatattcttgcaaaaaatactgtcacctgcattgatgtaattgaaacaattggtatgtattttatgcgtggaattttctgttctctagagattctaacaaaatgagaaatcatgtgaatttggcatgatttgtcttgaacaaatgtatgctagctcctcgagattagctatatcattttccaaaggttcataaaccacatgcacgataatctattctagaatattgtattaagctgaaaaagaaaagacagtaatcctgatgatgtcatcatcaccgtttttgaaagccaatacataatttttatagttcagatttctatcagaaatcttctctgatacttcttaaaaattagcatgtagttatcttacactagtagatactaaatatttattgaatgaactaattaataaatgaatgaaaagatacatgaatcattccattatcctgccttattttcttcatttcgacatatcaccctatgaaggtaatctattgttcactttatttggaattctctatctacccctgcttatgagtatagaccttgatctatctcaataatgtattcacagtgcctaaaatatagcccaaggcataatgtactcacttcatggagacaagttaaattaaggcaaaataatttaatccagctagggcttaggtctcaaactttctcattactcaatatttttttgccatattcattctacttcttccagttacaaaaatcttttccttaatgaagaagactaattcacaataagagttccattttctttctgtcatttgttaatgtatttccaagaaacacttaatttattcttattcttatgcccaatattctttcaaaactggatgctttaatttaagttcccatgaaagcaatttattttggaggtgacctcaggcaagaaacactgggaaggaagttcaggaaacatgacaggcaaaagaagaatgaagagtttaactcttccatccagaacattcagaatgcctccctgaatcttcagaattgaagtagtcattcagatagacctcaagaggttggtggtgtgacaaatgtttcagtgacttcacattcaagcattttccccacttttccaaaccaaagttatgttctccccattggcaccctagggaagactgacttctccccagcagattcacatatatttaagtgaaacatctgtatacatctgactcttatttcaaatagaaaggttctcattataatcttttacatctattattttccccattttgccattgactcattatttgtcaaagaaattcttctagaattattatgctaaaattagagtactaatatatgataaatctatatcaaatgttctaaaaacttcataattataagtaactatgttactattgtgtaaaataagcatcagacatttaatggcatgaaatataattactgttcttctattttaaatgaaaaataatttcaaggtagtataatgtatgcttattttaataaaagcatgtgcatatgtgtgagtgtatgtgtgtgtaaacataattgatacagatggtagaattttgagtgttttttctacttttttgtgatactataaaagttatttatttactatacacagaacatgtccatgtcccctataaaatgtacatgtaaatcactaaaaagtataatttggtgaacattttctcaattacagtacatacttaatcaggtgggatgacagctctctgtctgcctcaaaataatctaattatagcacccagtcttctttatatctaatgcaaagttaagtacttattttgggggttatttcctagtatatgtttggtgaggcagagtaaacaacttaactctagtatattacagtcactgcacaataaaccagattattacagattaaaacaaatcattttttcattatttataataatgggatcaaagaaatatgggatacttttaaatggcagataaccacacaattacttacctttgatagtatattggattctataattacattagtatatgaatgatgaaaaatactgttatgaataatacacctcaaacaaaacaacgaggccacactgtaatgattcactagatcgtgctcaacagacatttactgaataaggaattatctatttttctcctcaattatccagtacaatgttttgcccacagtaagggctcaataaatatttgctgaacatactgaccaggaaagaggtgagaagagatgggccctcttagctggatattaaatataattggaatttacctgggaaggagagtagttaggaagatgtaaattgcatgtggtgtacaagcaaataaacgcagatgccaccacagcaaatgattaagcagaaaacactggcaccaaaataaacaaacgcaagatttgccaataatggcaaaaattgaacttttatattggaccatactttttcccactcaattcagtttaagacagaccaacagaggcactgtcagacactatggctatcttccttgatattcagacatcctagtttccaataatttattatggacccattagccatgaatcagtataaacctatttctattgaggaattagtttccacaagtacaaagttgaatttccttttacttgtcctaaaatgcttactttcaaatttgaaaggacttcaattattccatgtagttttcgataatatttttgtatcttttctgaccagagtcaaaatagttgtgcagtcatcatactgcagcaccttccacccaccctttggtcacttgaactgcctttctttggttctttttccactttcagatatttgtttaagtgtagtaagcagaactgtactgggtattccagctgcagtttggcctgtcattgtcagaatggcttctgctatgccgtggtcttccagtcagtctatttctagatacaatcttttaaactgttatcaaaagactgacttcttgattttctttcataacttcagcttctagaatgtccgtatctgtcataatcatcatagtgtgaagaactgtacacattcctcccttccttggctttcatttgatttggtgtcttccaatgccctggacaaactgtatttcaatctgccgtccacaaatccactttctgtccaaattatgtaaagcatcttcagcatcacaaacatcctcaagttgaccataagcaaatcttggacggtgagtgcagaaatcaagtggaacatacacatcaactataggaccataacgaccaaattcacactgtaaatcttcagacctggtgtcatcggccacattcctgatgaggagagacgtgttagggggacacaagtagcaagacatggaggcatcgtgtctcggtcgggcacactaatgggctcagcaaaccaactgtggctctggcggccaagcgtcagacacacacagcccagagggctctgccatggcaatccacctcttctcatgagacttcactcctggctcctacctccgtgcaaagcccgttttttttctacttttaattatctatatgtctgattttctttttctaaaataaaagcaaattattttgtaataagcaaaaaatattggcaattggtataagcaaatgtacaaaacaagaaagcagatcaagtaaaagatattacttatagatgcctaatggcagcaaatatccttactttatcaaagaacatgccacttactactaattacagtaacaatacatttttaccatttttcctattaaaataacattagaggatcataaacttgtgactggaattggttccttctggtgggttcttggtctcactgacttcaagaatgaagccgtggaccctcgcagtgagtgttacagttcttaaagatggtgtgtccggagtttgttccttcagatgttcagatgtgtctggagtttcttccttccggtgggtttgtggtctcacttgacttcaggagtgaagccatagaccttcatggtgagtgttatagctcttaaaggtagtgaggacccaaagagtgagcagcagcaagatttattttgaagagcgaaagacaaagcttccacagcatggaaggggacctgcgcaggttgctgctgctagctcaggtggccagcttttatttccttatttggccctgccaacatcctgctgattggtccattttacagagtgctgattggtgcttttttacatagtgctgattggtgcatttacaaacctttagctagacacagagcactgattggtgtattgggactttacccctgtcctataaagatgttatgccccaaaaacgaagtggagggccattccctgagggagggaagggaactccagagttggaagagtgatgccttttgtcctcacttatatgaataggaaggatacattgtctgaggctccccatatcctacgttccggaatagcttttgtcaggcctgcttgtctgaggagggttcctaaaattccaggtagtcccccctacaattgggctttgggcaaaaattatgtctttctgattggtgagcctgggtgcctaaagaaagggatagagtcctgaagtttatactagaagtcattcttgcaagagaaactagaaaagcaccagagacagggagtggtttttagaagcgggactagcctcggagaagagaggcgagaggaagtttgtctggcaggcatcaggacccaggaggcaagggtcaggatagataggatagatgggagagtctcgcttgggcgacatgactttgagagttctgctcagggccacagggtcaaccaacttgttgttgggactctggagctgaatggctttcctctctgtcgaacttcagctcagcccagaagtacaggaaaagcagaagctggttccaggcaaaccaacgctcccaactccgaagagtagggggtcgttagagagccctttcccagaaaacctgactcctgtgtatttagtccggcggctgcgctggtcacttttaactggctgacaggtgccaggtatttagcccccaaattctaaggaaaaataggacagaatagcaagtgaaaggggtctgatggtgctcactgcttggcgatagttgatagtcccttcatggtcgccaaaatgtgtccagaattggttcctaccagtgggttattggtctcactgacttcaagaatgaagctgcagaccctcacggtgagcattacagttcttaaagatggtgtgtccagagtttgttccttcagatattcagatgtgtccagagttgcttccttctggtgggtttgtggtcttgcttggatttcaggagtgaagccacagatatttgcagtgaatgctacagctcttaaaggtggcgcatccagagtagtttgttcctcccagtgggttcatggtctcactgacatcaggagtgaagcctcagacttttgcagtgaatgttacacctcataaagttagtgcggacccaaagagtgagcagcagcaagatttattgtgaagagcgaaagaacaaagcttccacagcatggaaggggacctgagctgtttgctgctgatggctcgggtggccagcttttattcccttatttggccccgcccacatcctgctgattggtccattttacagagtgctgattggtccattttaaagagtgctgattggcccatttttacagattgctgattggtgagtttacaaacctttagctagacacagagcgctgattggtgcatttttacagagtgccgattggtgcatttacaatcctttagctagacacagaacactgattggtgcgtttacaatcctttagctagacagaaaagttctccaagtccccactcgacccaggaagtccagctggcttcatctctcaaactagcactacttcacatccattttaagtaaaatttaggttgcaatatttagtttatctccagtttttcttagatgttctacatctcttgaacaaggtagagaacaaaaaaaggtgccaggaatttctattaccttttttctataccctaattttgagcgtttgtgctgattaaatacaaaaaatataaatattagtgattaagtaaacctaataaattcacttgattcaaacataataattgattttaatagttatcattgttttcattatcattatcacaccatcataagtaagtgacaacactaaaatattagaaattataagcagattatgttggtggtagattatgtagaattcttcctgagcatatcttatagtagtatctagtcactttttataagatgagcaaaagaaataagatggcagctggcaggaaaaaaaatgtttttgaaaacacctcatcaagtacctaccacagagataattgtgctttgacaatatcttaaagttcctctcaaattctagtacaaaagtttttgttacagagcctgaattcagttacatcttggatatacacaatactatgtgatctgtttctttgttgtttgtcatctatcactccaaatgacacatatttggtggtaaaataggaagacttttaattcattattccagagataaactgttccccttactgagttttccacttctcagttcataactttacaacctagagcagaatatttttgtcatgtctataaccttccccaaaaatgtatagaattatcctatcaatatggtagccataatttcaaattaaataaaattaaaatttcagtttagcaattgcactagccagatttccagtgctcaattgccaactatagctagcagctaccataactgggagaacggttttataattcagcgagttctattggatagtgctgaatcgtatatcaaatgctgtccagttacttgttaaaacctaatttaaagctaagattttaataacagtgtagttttgtcataacatttaatatttggcttacaaggtagctgatgtaatttaagatagaattaaatgcaattgttgctaaaatattccactctgttgccacactctagaagttatctacaaatatactcacaaacaggctgctttactgggtaaccagggtttgaattagccctgcagcattatttattgctgtgtaaggaatcattccaaaatttaatagtatgaaaaggcaatagtcattaattatctcctatgatctctataggccaagagttcaggagcagctaaactgagcagttgtggctcagaatctctcatgaggttgcagtcagatgccagctggggcttagccatctgaagactcagtggtgctggatgatccatttctaaggtggctcacacaaatggcaaattggctcctctccaagggacttcttgagtgttttcacaacatgactagcttctggaagagctagtaatcccaaatactaaagcaaaagctgatataccttctatgacctagctttggatgtctcataccatcacttctaccatattctattggtcacacaggtcagccccaagtgattcagtgtggtgagaagcacacaaggacatgagtatcagggcacaattgtcagtggaggccatcttggaggccaactactaccctacactcagcccacagtgtttcttgctagagtataggggttaagcacaaagagtgaaagacattaccaaggaatttagtcacactgtctcgtgcctgaacatagatttgtctagtgattccccaaaggaagctccatgtttcattcaccctttgagctttcctcaaatgatcaagatactggaacacttcctgctcaccagccttccccacatgaaacacatttaccacataaggacaggaaactttacaaaatcagatctttaattgttttgaccttagctgcaaaatggaatgtcttggaggtcttttttaaaaaattactgatacctaggtctcaccagagattgtaatataatttgtctgcatgcaatccaagaattagaaatctgaaaaagacccccaggtgattccaatgttcggtgacaattgagaaccaccaattagaggaagacccttctgaatgttcttttctgtgactcctctccttctttaagtgtttcatcatacttcacagcccttagtttccaaattctggctcttgtttttcaacacaatccctgagaaaactcttcacttcccacaaaagttggagaatatcttggtcattttcagcatctagttacctccattaacccaagatgcagctcatctttacagaatcccaaggggcaaaaactggttctagttttaagaccagagaagaaaatagaatgtttgaatccacttcaggccttgactgtaggatgctgcaaataattttctcactatttacctaagaaataaccacaccttatcaaaaggaaaattaatatttacctgaaacaacacagttctatctaacataagaaaacaagttcctcctgttaacaagaccttaaccctgctccttgtgaaataataaataaatcacctcagcatgatgatgttaaggcacatctgatcctttcaagatctggcttattttgcaagagaaacaacagtagtagaaaaagacttctattttagccatctggactagtgctagcagttctatctatgtggtttcagaccttcataatctgtgctcttataaacagaagagaggtgtctcactttattacaccacatcatcaaacagagacactccatatgtctatcttcataggtattttcggaaaaaaaagatctagatatcagcaattctcacaattttagcttgcatatgaattacctgggatcttgttaaaatgcaaattctgagtcatgagtgggaaccgaattctgcatttttaacaagctctgggagacatcacgttgccagttcacagaccacactctgagtatcaaggatctagatactatagataaataagaataataactacaaagcacttttcatttcttccctttgatctcatgcttgtccacagaattaaaatggttttatctcacctctcctcccacttttttattcacaaaatctataatatttagagaattctattattcttatacttttcctctttttttattatggcaaaacgtcttctgaacttctttgtgttataagagtacagatgagtttgtgaaagaaagactgataggaaacaaatccaagatcccacaaaaaggaattaaatcttctttaccaaccagactaaatatttcacaaatatgtgttcttctagaattgctatcacaaaacatatagaacataatacttacaaaatgattcatgcctgggagtattatggttacatgatagtcggtagtttactggctgtattgctttattttattttagtagccaatctattattcaggtctttaggacacaggaaaaaaaatatgctcattagaaacatagtacctcctagctttggggcgaggaatctatatgtagtctaattagctataagagatagaaattatgttcattgttctactatttctttgaagcattctttgtcattatgatcctgggccattccagtggattatcttcaacgataaaaccaactaaaatatcttctggaccttccttgtacattaataccagttcaagaaattactgaaatattttgaatagtaaattattgagttaattacaagacagtgaataaaattgacacctttcttttgtcttttataattataaaaaaaagtctactgaaagaaagagcagaacaaaacattgaaaacaactgaaaagacacaaaatgtgtctttgtaatcttggctacttactacaatcaggttaagcttttcaaaaatccacttttattccaaaattattttaactataaaaagtcaccaaacaaatatgactcagtatttaacaaattatatcattcttagaactgttaggttaaagttactccaaaatatttccaattaaagtttctgtaattgatttacatttgagcacatagagaaaaatttactcccaaattgctataaaagtagttcggtacccaatgtatcaccctggagaaaaaaaaaaaatgactgtttcttttgcctccatggtatcaggcagtctaatcctacaatatttccaaacctcacccatcccagaataaataaatgtatgagatgacattgcaaattggacgcccaatgttcacaaaagctgactctttcataagagtcacccttaccacaatctttaccttggaaattacatctgaagtggctggatcaatcccttcaagcagcatatgttgaaattttagtctaactccatagtaactatagcaatgtttatttcattacaaactataataatgaacataaagaactttggacataaatatttggtaacaatagtgaaatttcctaaatctggtgactattgttctattggcccctggaaggccatgaagaaatacaaagaacaagtaacgacattctcagactccagaattgaaaaatggcttaatgggattcttcccgtttgcctagaagttagaagatgtggaatcttgtcccactttgtcactgaccattcttttgaatttgagcaacacaatcaacataaatgagccttagttaatgtatttatgaaataagaaatggttagtttcaatatatctgaagtcctttacatcaagaaaaatataaattgttcaattgtattttttttttttttttttttgagacggagtctcgctctgtcgcccaggctgcagtgcagtggcaccatctcggctcactgcaagctctgcctcccgggttcatgccattctcctgcctcagcctcccaagtagctgggactacaggcacccgccaccactcccagctaattctttgtattttgtttagtagggacggggtttcaccatgttagccaggatggtcttgatctcctgacctcgtgatccgcccgcctcggcctcccaaagtgctgggattacaggcatgagctaccgcgcccggccatttaattgtattttaaagcaaaattatattgtgtgccttacccatttccccttctccaatgatctcattcttgatctgaagctttttggaaaatttcagccagtaactctgaattattaattatactcctggccttttctagacaagggaatatacaatagcctacaaatgtggtaaacaaattattagtcaacagatatttactgagaaactactagagacaaagtactatataaaactaattagtattagagcctcactggaaccaactatggggcataactggtaatattattaaacagtgaagctcccaggtaatggattagagtagagatacataccttaaagaggcaggagactctccatctaagcctggatagttcccagagggacagtgttagcatacttgagaaagaaatgcatttgatagaaacagcattgatcagccttggaagcatagagatataaccttgagaacctgtctagcacaatttagatccactggtacccctattgaagagtcctcaaggatgaaagagatataactatcaggctaaattgtaactggaatttagttcttccaactaattccactttcatggtatccatgcccactaaactaccatctgattctaatttgacatcccacatatctgtcactgttaagcatggaaaatatgatttccctcgaataaaaataatagatttttctgactgggattagcagctcttggtgcactgataaatctgtattctgagcttcttgaagtgttggcaggaagaaggggctgtctataatgaacttcgtataataatgccagactttcccaaggaaaccacacatcataaccgggcttctttccccttaagcttcaacacatttatttattctttatctctgttctctcttatttcttcttattcttatcctcttccctctccttcaatttgcctcaacaaagataatgaactgacgtgggcttgggttttaaaaatatttgggattagacagatgttagaagaaggcatttcaaagagaggggcaattaaattgggttgggggattaaggagaccagcctcaggcagtttaaggagtgatgctaagtgaggtgagactagaagcttaagtcatgtccagatcataaagatttccaaatggcattaaggaatctggccccaggcagttgactgagagtttttaggatttctcaaaaaataaagacatagaccaaagttgaattttaggaagattatgtatattaaatacaatcatacatgaaggagtatgtgtgtagtattaactataaactatacttaacacaaaagtacataggtcagtactttcaacttcaatcaaagagattacacattcctctttagtgaatggaggtaaggaacttgtagaaaatgactaatgtttactcacaaggagacaactggaaggagctggagggatgtgggtatgtacatgagtaatggaaggaggaaagaaaagaaagaatagagatttctataattcatccagtacctttcctcaggggtagagtttggctttcaaatgaccagcaagtcaacattggcagcagctcagccaccagagcaatatccaggaagctactggaatcacagaggattttgaaacacatgtgtctggatttcagtgttattcctgaataagtctgtagtcttccctcaacacctccttctgtgagaaatggaaactcgggcaacacaaggcaaggagggacaactggacacaccagctgaatcataacatctggtgaagacttctctgctatcacagaatctgagagatggctaatactcagaccagctcccaagagtagcttttcctgcaggagggtgcaacagcctcaggatttcagctcagggggaaatatgtctgtatgagtaggagagaaatggagttgtgtgtaagcatatgtttgtggttttcgaagcagaggacaaacacaaaatcacatagcctcctggtctgatgggtttccctgacttggatgtttcagtgatgcagtttggccctagagccttcatctgagctaaggttccctccctccctttttgcttcagctcagtgttttgcttgaatctgagtcataagctccttaagctggcaggaagcggatagtcgggctggcagcttgctctcccccaagcagagggagtgtcttggctgacacctaagcaaccttttccatccccagactctgtaacagaaccaatgagcattagaagaatggaaggctgggctatactcacagagtagaagagaaaaaccatcctatagaaatccaatagctcaagccatggttttaaaaaaaatggcttatggaatttcctcagccactcatgatgtccttacaatattttgtgtttatccctcaaagcttgtctatgtacactctcaacctagctcccaccccagctctacaggtctttattctccatccagtttctgaatgattttcccctctagcaaactccatccttccctctacttctcctaaaccacagccactctaacagctaagttcatactctgaaagcttgccctgtagggacttagagcagaatactaccaagtatgacatcttggcatgctgagtactttgaaatggaggagataggaaaggcctctgcaacaaggtatctccaaccttttccctctttcttctgtcttctaagacatgtcatagaaaccagattcctctcccaaaggtgggtcatagaaattagaactcctctaccccaaagcaaaccataaaacttagaaaggccacattctgacttacctcccttgaaagtaggccataagaccctcattccagagggtcctgccccatatccagggggaaataatgctacacagagagatcaggaagaatctgaacaaacaggtcttgctagggtctcctctttcccccagtttattaccattagatcataccttttttgtcaaatcatgtttctccacaactatccacttctttcattagacttagcataaaaacacacagctttccctgggtcttcaggtcttcatttctgaaggctcccatgtcatgtaaaactttgttaaataaatgtgtgatgtgtttctcttgctaacctgtcttttgttataggagtgttagtcatggcctttgtgatggatgagggaaaggtatatttttttatcctttcggcccccattcatgggcaaagtaataagctacaatctgaaggaattaaggaaaggcctctctcctgcccagttccagaagtcctgctttactgcatgatgaagagtacagatgtgatcagaaaggaaggaaacactgagacattatcactcattgatactccagctcccatcagttgtcaaattaacttcaacaaagatcaagggcacaagcaaagaaggaatcagatttgggggaagcagaaaaactaggagagaaaagtctggcatatgaagcttgtcatacctaatgatactacaatgtgggtgaccttggaagctgtagttcaggaaaagggagggtgggggtctgaacacctggatggagagaatctgccaaaagagctaaggggtgttgaaaagtcatggcagaatgttggcagcaatccttacctccttcatagtttttccttccaccaacctgattacttaagtttaggactgagacttggcaggatttttgcatgcagaccccaatagaaaaagtctgtctcacccaagacaattccagcactctgtatgctcctttcccaactccttctgactcccttgcaacatcccaccatcatgtgccttcccctggccctgatcccagcctactcagacctcacttctgacatggggcaagacttcaagcccagggcctctggccttttttctacctgatgattctctgcttcttcctgtctgcaccattgcctgataccttctgattgctcagaccagagctctactgtcaatcaagtgcttgacccccagaaggcagtctttggctttccaatttagggaaagtaaaaacaaaacagaacaaaaaatatccctaaaatatttgaaacaggttatgtttggaaagttaaagctggtgaatgctgaatgtgtaaaataacgtctcccactattctagagagaactttgcaaagcagctatagttcctatattagaaatatatgcagttttgttatgaattgagctctttctttttacagacactggctctttgtttatttcagatgtgagcagctacacagctgctcccccgttcaatatttgcagcatattagttatgagagataacactgaattattaatacaaataatgtgttaatactgacccacctgtatgtggaaagggccttggaaaatagtttctacgcttattttaaaatgatattcaaacgaaattttcataggggagaagaggacacacattcataagcaccaggctcaagaaagtccatctctttttttcaaatttgtttagatgagatgtgctcttcactctttccccacaagtccattctgaacatttgaatgccaatctccttgaagatagattgatcttagaggaattcaaacaaactaagattttgtggcttggtgtttgggcattgcagaccttatctgacagtctgggtttagaaatataaggaacagaagcaatcaatcagaaagcaagaaacttaataacaaactggtaggaaacagaagtgactgcaggaaaacttcattcattcaaagagttgaagaaagactaaaatgatgaaatgtgacttacagaagaaagagttaggtgagaatctaaatctaaattcttaaaataattctgtctctaatgagatatgtcacctgaagcagaactaaatgttttctaaagtctcataatatgatataatatcccatggatgatgtactattctatgttcctttctgatttcagcctcagagaggtgatgcagtcaaagggacatcgtttatacaaaaataagactcctcaaaataaattctttatttgcattttttgaaattcttgaagagaacagacaatctccaataatactttaaaattcctctttacttttatccacagaagacatagaagagttttccaagatactttcttcaaaatagcaaaagaatatttccctctaaccctcctaccttccagaaattgactcctacttacttctggcccttcactgcttcaccactttattatgacaattggttggctgctttttttgctaatcctttcccctctcctctcacatctcagatcccatccttctatggtcatgctctggttctccatcacaactgccagaaggactggactgaccctcctcagatgacagaactgaagggagccaaagtcctatttgtcctacagtggatgtgagagactgaacatgcatagaggaatgctttccattgtcataccagatctctatcgattccaatagggatggcaccatgtacgagaggctgaagaaaagaccaggtcagaaaatgagacatagagtttattaaggggacttacatacggagacagtccagtggcagaggatggacaagagaactgcaaccatttgtaaaaagcatgcaggtcgtatagcattttcacttagcaaattccacctggcaacctccatttaagccaaacaaaggccctctatcccctgtatggcctgcattccaaggatggattggggattcagatgtccttcatagataaggagtggatctccaggttggccattgctggattcattagtccaggactctgaacacactttcttcttagatcatagggtccttctcctaagaaggactcctaagaatatgcttaagttattgctctcaggtgcatctgtcattcacatgtccattttgataatgactcatgcatgatcttaaatagaaatgatattttaaaatatatagtgtattccaaaggattttccaaatagaagccctaaactttgatgagttattgtgaagtattctatcttgaagtaggccatatggcattcaatgaaaattaatgcattagagcaacatgcatttgtgtggatgattctcatgcatatcttcctctcctccaatactctgttgtttgaatacctaggtctccccagactttcagctatctctcctctacccaggttgcccaccaagccctgccttggttctctcctcatgagtctggaaagtttctcaaggcagtaagctgtggcaattataggacttaccacatttatttgctatcgctcaagaatcattgttctgtggcacttggtgaccaacgtcttaaaaacttttttacccatgtattttgtctgattgtttgtttgtttgtttgtttttgagatggagtctcactctgtttcccaggctggagtgcagtggcgtgatctcagctcactgcaacctccacctctcaggttcaagcgattcttctgcctcagcctcccgaatagctgggattacaagagtgcaccaccacgcccggaaaattttttgtgtttttagtagagatggtggggcaagggtctcaccagattggccagcctggtctccaactcctgacttcaggtgatcagcctgcctcagactcccaaagtgctgggattataggtgtgagccaccgcaactggcagtctgattgttttgattatttcagttaaacaggtaaataaagttcttaatccatcttgaccagaaggaaaattcccaccagctgtggatttaacagaaactcaggctatatttgaactaaattgctaaagatccacagcttcagatacataacagcccttcttccaccaacccttcttccaccaaaaccagatctcaaagaaaatcccataaccttcactatgttttgtgctttcatcacagtgtacagcctcgctcagggagagcgacctcttcttgggtgtgttagtttctgagggctgctgtcacaaatttccagaaacaacaaaatttcattctttcacagttctgaaggctagaagtccaaaagcatggtgtcaatttataattatctggaggcaattccaatgtcttcattttattctaacacacagcacccagcattgtactttgctcctcaaataagctctatagtgtttatataatgtttaatttaattgtaacagctaaaaggcttttctatgaaggtgatttcagcctccagttttcaatttaggaattcctaaaaaatagcaccaggtgtacaattctaacatgtctgtaaggaacacctgactagggaacaaactatttttcccacctgtgtggaagttactggaatgctaagctggagaaatttcactaccttgtaagccacagagaaagaaaaagtggtctgtagaaactattagttaaagctaagacagagtcaatcataaaatgcattcctgacttcagagataattgaaaagtgaaagatagcagattcagattcaaacacatacagtgtagatacgtgctttgtttctgagcaaatggagatggctatcttgcaagtgccctttcaccctgtccagaaagtttccccaactttctacactatgagatttgaccatcttctaacctcctcacccccagacatccagctatactacatctcacaggtccaacctagcttggccagtcttatttaaaatttaaaacagaaataccgaggctgggattctttgtagcgaagtcacattaatggcaattgtctgacacatggtgctggggtgtctcataactttcctttagactactctttccaaaggctaaggggtttaatcctcccttgattccgcaaaataccccgacatcattccagtaaattcttttttgtggcttaagtcagccagagtttattttttgtggcctgaaacccagagaaccttaactaacacaatgccctaagaacattttcggaaagatatgcaagaaattaatcttaattatctttgagaaatgaactaggtgtcctaatggtgtagaaggcaacttctgctgttacttcataacaacgtgtatgattggatgttgtgttgttatggtctggagcaaagggttgtcgttggagcaaagggtttccagtttggagtttagtctgatttggggtgttcatttttacaccgtgagcatgtattacttgcatacatttttcagctaggtttagtgtgtgtgtgtgtgtgtgtgtgtgtgtgtgtgtgtgtgtgcttactgtcatatttgaaaaggaataacacgatgatagctttctgatttttcacagctcatgtttgtccctatcctggtccagcccccttatttcacagacacacaaactgaccctagagtagataggacacagccaactattttacagctaccgtgagatcattgctttagaccagcctagaattgatcttgttgataatgttcttgtcttaaaaaataatgatcttatttttaaatgcagtagatactaaatgatcaaacatcttcctgtgaagttgccttatgtgttctccttctacatcatactccaaatttactcagcttgaaacttttgctggttaataatctcctactttgaaaagaaggtcaagcttagatggatttgttattgatcacacttgaatgtgaattgtcttaactgggttaaatgtaggcagacacttggataaaatccctctcagtgaatgagttgggtgttctgatggaactgtgataaatttaggctattggacgtcacttaggaataccgttgtagttctctccttcatctttccccgccactaccacctaaaaagaaaaaaattaatatggtcagaaaaattatatcccctggaaggaaattagcacaagtcaagacaaatagactaaattagccatttgtggaaatagtccattctgggagttgacctgcaaatgccttgtcgttagagcaaagggtttccagttcaaagagggctcaggaaaattggatggcatgttataattataaagcagtaaactctgcagttgtattttaccttgcttaggatgatgtcatggtgctttagcaactgactttaaaataagagagtgtaagaatgtattattgttcatccaggactgtcttgagaatcagagaaccacccaggatcactctgattctacatgagggatctcagtaatttaaacaggcaacaggtgcttcctaggccactaaacttagtggaaatggggtcacaaagagagagaaaggagggagggagaaatgagtgaaaggatggaaaaaggaagtgacaaatgaaaggagggcagagcggggaagagtaacggcaaagaaatgaggcaaaaaggaaggaaaagccccttctccagaaacaaacgtaattctgcccctcaaagtgttagactgttggggcagagtaatgatcctctcttctggtatattgtaataatgtttttaaccagttttcctgatacaaatttacattattttgtagtgtgaatctaaatatggaagttgtcagctcactcctgcttaaaattcactagtcctccacctcctttagggcaatgtggtttttcggttaagtttgcctttcctatctcagaacttcacctctcagccatgacccttcatagtgccctggagttttgttgatctgtgcagaatgccttgcttttttatacccttgaggcttttggtattctattctctctaggtagaatgaaaagtctgcctttcaaccccctaaccatcaccccttttgccttgctgtctcaaccagtgagacgctcttcaaacaatatttcttctgtagagccacgcatgcctcttcataagagaatgattcattaagattctattggcatatatcaaataaactgtggttgtctcagtgaatccctctctctttgtaaatattgagctcctaaggaacaagcaccttctcatgtttaccagcatgtatatataccagtctcccatgtatactcataagtttatcctcaaaagtacttgaattaatgaagaaggcaatagaaactattttctagaaaatgcactcaagtcttgaaagtgacataaaaatttcttggcgatttttaaattatttaggggtgactgttaagttgtagaaaatgaatagcaatgtgaatgattcctgcccatagcaatgcaaatgaattacacaaatccctgcaagtcagattttcatttgaaccagtcaagatcttactggtccccatggccgggcacggtggcttaagcctataatcccagcaccctgggaggctgaggcgggcagatcacctgaggtcaggagttcaagaccagcctggccatagtgaaacccccatctctactaaaaatacaaaaaattagcctggcgtcgtggtgcacccctgtaatcccagctacttgggaggatgaggcaggagaattcttaacctgggaggcagaggttacagtgagccaagatcgtgccattgtactccagcctgggcaacaagagcaaaactccttctcaaaaaaaaaaaaaaaaaaaaaagatcttactggtcccctcatttatctcatttattaatgagtcaaataaaatctttgacatgcattcatttcacatttggatgagagtcatgattttactatttttgaaaattatgctttaacactgtaatagaacatttttattgaatatgtctgtgcataaactaccaaatagcataggttgactgtgtgttaatagaatatagagaatgttttctattaaacttaacacaatagctgtaaggcaatgtggaagtgaaattaatgtatctgttaaaatcataatactaaattagaacacgaacagaataatgtaatagggccctttaaagcaaatggttgccacgtttacatacacacactcacacatgcacaccctacatatatatctacaaataaatatgtgcatatgtatatgttaaaatgtaactgatacattgtagtcagtatgttttccataaagtaattataagtttataggtttctccatcacaagtatgtatcacactctattaaacatgtggtcatgagggcacagtgttaactctattgcttaactcttttaatcactcttactcatccttgcctgttatttgcttttccatcattttccttaactaaagcctatgtatcatccccctgccagacatcccccttccacttatttgagtggaaataggaactttcccaatgaaggcagctgaacagacggcattaagcaaaaacgtttcaaatctaatggcccattagtcacactcaaccgatgatccattgaaatgactgaccaggtaactaggtcagctaactcaagggaagcatttacgatacagctctcacttttccaaacccacggaccacagcttcagcctccattcacaaagacaggatatggacccaggagccatgtggctcattacctgtgtggtgggagttgctcatagacacaagcatgcttcagaggactgggaatacaactttctctaagactgaagtttagattatctctaactctaagagaagggcactgcaaggtcaccagtctagcactttggtgtttttttttttaaagcactacatcatttcttaagatacatattacatatgattaaaactttatcctatttttctccctctcttagctggcattccttgggagtggaaaaaaaaatcaaaggcattcccacacaaaggtccacattgaagtgtgtttaagtgtctgattaaaactaacaaaagacaggaaatagggagttagaatttaactcagtcctgaactcaccctcttgtgcctaggtaccaaggggtcaggaaagaacctctaggttcagaattagctgcttctgtttcctttcactgctgagatattatacttcaaaaaaatattaaattgacaagaagcccccaagtgcctataacccccacagggtggtaatctgtgcatatctctagttttaaaaggcatgattcaaccttacacctcttcaaaagtacaaaaacatctgttacctttggtaaatcccctttcctgtgtatctgttttctggatgtactgagttatttccctttcaaaaatataaatgaatcagaaaaagaaaagaggccagaagcaggaaaaaaacaatgatttcttagcagatagcaagcaacaacttatttatttctggttttctctgctgaggaaagcactaaattcatattcaaacttaattttctaatctaggatgacttccagtacaccaggtatgattctgactcttcctggtcatttttcaaattcgtcctatggtaataattgcaactgcctccagcttattcgcaggtggaaagtgcacctcctctgcaaaggtagactgcctttgggacctagaccatctttgtctagagttctctcacagcagtgctggcatagacactactcaggtttgcgtgtaagtctgctgattggaactgggaatgcatttggtactttgcatgatggtaaaccatagttagccttccgtgatccacagtattgctgaggaaattggtgagggttattaagactccaggtaccacgagtagcaaaggacatccttggggagaaatactcagggttctaacaactcagagtccgtgacactcttgtccttggatgcccttcatctcatgccccatgacttgagacagatagatgttctagcagattctctccagatatggaaaactgcagatgactggaagttcctgcaagtaaaaatctcccagatgaatttgcagagcaagcccgcacctcccacacaaaaggacaagagaactgatcctcttttctcatcacgtctgtcagtttatattcttcaacccccacaaagaagtgagcaaatcatcattcttcctttgaccaagaaaaacaatgcctttctttacatctactagtagaagcaacattatgaaataaaaatgaaaaacatccaagcagtcacaatgtttaaataagaattgttggtgcactgtctccatcagttgagtaaaagtttaaaattgtttcctgcttgccggttcacacctctcaccctcttctttccacatgcaaacacgcatttttcattttcacttaaatcttataagagggaaactcaggcattgagaagactgttcggtgtaagtgcctcgaataaataactcagtactttcagagaataataaagcctataaaaaaagaaatagttaaaagtgtcatgtaattttgcatcccagctggttaagttttgagagtgacaggggtgagaacaaatgctaaacctgactgggcaccaggacaagagcctccatctgggactctcccagacaaacctgaagttgggaggtctgtctccaggtaaagtgataaaaatttctggagtgactttcagaaatttgtacttagagaggcagtgggagacagaggattgaacccaatcatgcctggctgaagtgagctttggaaagagccacacaaaattcaaatgcaggctggatttgtggggccagaggaaataggtagatatttagtttattacactagatatttgagaggtaatagaggtttatactggctggtaccaataggatgaatgtgagggattattgatgtgaaatgaatagatctcaaaacctcatgtctataaacagggtgaatcagaggtgatttttctgagtaactgagtgatgtctttagcagtactttgggaaaaactaaggccaaaaggttgagtaatatacatgattttgccaactaataatgtgacctctagatctactttttagtaaaaagatgcctctatttcagtgtgataagggccatgaaggggacatgaacaagaaactctgaggtcctaagaactgattctacttttgccaggtgtggtaacaccctggactacaatctaaagatggaccctgctcgctcaatctctagtttaattacctttggtgagtaattgcccttttctgagcctcagttatagatttgaagctctcatataggtatgttccttcattgctctgtactttggaatatgcagctctctctagcagaatgcccttttccatcttgtctacccgagaagccctttgtcataccgaaagttaccacctctgtgagactttctctgaaaaatcatcctctggaaacgtagcctaccaatcatctgtctgttgatttcttgcggcagatacaacttcctccttcccagacaccttccaggcatatagcatggcttagcccaatgacacataatcagaaatcttttgaaatggggattcaagaagaccttttacttctctggttaaaaggaacagccatcacattcttttcccatttttccttgtttcttcaaaccaccttgaacaccattataattttggagataaatcagccatctggcaaccatgttgctaccaatgacagaatgaaatccagcaaactaagttgtggaagatatgatcagtagactcatttatgtcatgttgaagcactgaaccagccctgtacctaattttattcttcctattataaagacaaataagtccctgctttccaacccctgtgagcaagtcttttcttaaaactaaaagcatacataattgacacactatcagttagctattgctgagtaacaacccccaaatctgcaggtcacctaggtagcccttctgatctggtccatgtttctgttgagctgtccaaacatctggaggccacattgccagtctggctagactaggaaggcttcaactgggacagctgatctctactccatgttctctgtcatctcccacctggctagcccaggctttcgcacatgggagcagaagagtttaaagagaatgtggagcatgcaagcctccaccatcacatctaccatgttattggccaaaacaagtaactaggccagccagatgcaaggggagccatggagtattgaaggcatgactgcttgcactcaatctgtcaaacaattgtaaagtgtgagagtttgagaacaaggattgtgagatatttgtaactcctatatagtaagccttccctcaccttatttttagccaaatgtttgctctgcttaatttacagggctattgttagaaccctttatttctgagttcacagtagatcaagtaggaggcctttagagatgcaaggaatcagattaccacatactcaattactgctggtataattagatttttgaatgcatacttgcagagcaaagttttcatccatctccagggactttggaagaagacaaaaaggaaaccaatacatagaagagctttagctcctggctgaatttgaaagtggagttaacacagagtgattcttatccttgccatccagttatgattacttgttaccagtggatagcatgttgtacttcaatcacctacttgaggtaatacttatttttttcctgggagcaaactctcccacctggtctacataggatctttcacgaccactttcagcaaaccatcctcattgttccccagaataaaggataaagaagcttagaaaacttgtgagatcatgtcttctaaaggaaaatttttgaccttgaacaagttggaagtagagaacagtgcgtccaccaactgggaaataatcaatgaacatcctacccctaatatatgatgcatcagagactggctaaattctcaccagtttcttggcacacagccaaagtacattcccctgacattctgcatctgggtggggacatatgactgttttttgccaatggaatgtgaatggaagacataccttttggtataatgcaggggtctgcaaactatagcctacagggcaaatgtggccaatcacctgtctttgtaaataaagtttcattggaacatagccaccctactcatttacatattgtctaaggctcctttcacactatatcagcagaactgtgtagtttttaacagagattgggtggctctcagagcctgagatatgtactattctttacggaaaaaattagctgactcttggtttaaggcatgttaaagtgaggtcctgtttcatttgctcctcatctgctatctggaagatgtcaggccagtttttgaagcacgactggatcttgcagagccccattatgaaaataattttatctctgaatggatgcacaaagcagaggctcctgtccaaacaacagacccatccccattttcttggaattcacattggaacatgatacaagcaaaaaaataaaactttattgtgttgaggtactgagacctggggactgtgtgtcatagcagcaaacactactttccttgactaatataaatgaacagagtacaatgctctacacaaatatgatatttaaaaattgagtaattgcagcacggaaaaacaaaggcattggtctaagacctatagcaaagcttggaagagacaagagtggttatcatttcccccagcattgtgatgaattggcagagaattactgcagaccaattctagcaccaaccttaaggtccttcccatgtgatatgactcaaggaaaattgaagattccagccgaaaagaatatctgcttgctggcttgtcactgatacctgcctaattgttttttattattaaaggctgccttgttgttgaaatgtgaacaccccagaaaatcattagctactcagtattagaaaggatctcattatactctttttaaaggagaaccagataaataagccagaaatgtatttttattctctcaagacagttaaagtcctagacacctggaagagagggctataaaaagagataggaacttcttgcaaaaatagatggctgtctaactttgcccccttcattggtataaggcatgactcaggaacctggcaatcgtcttgaactcagaggccaagatgttttcctaactacagtgccctatattccttacctgctttgtcacttcctcttcaacatgagtcacttcctctgagaactcttcagatccatttcagatgatttcttctttcgtctttcacaacccctgcaattaataaatgccttaggaaagcacttattatactacatggcaagtgtaattttacacatctgtctctcctaccagacttcagtgcagggccatttcctggcataatttctggaatatagaatatatccaataaatatttgttgagttaaaggtaaactgttctctagacaaacgggcccccagatctggttaagatttaaaatttcttgaggaatacataaatatggactcccagacctactgagtcagaatctataatttagaccatgaaactgttacttttcacaaagtgatggtggagcattgagttttactctccaagaatctaatcaagcattagtctttttctttggtggttggtacttgcaaagcctcacacataccatgaaaacaaggtggagaatacattcatttatgtatttagtcatagttattgagtgttccttttgtgtcaagcactcctctgggctttggaagtagagtaatgaataaaatagacaagaatccctgcccacatgaaatttatattccagaaagttaagcaagacaaattaagtgcagattatgtttgtaataagtgctgaagaaaaaattaagctaggaaaggatcagaaaatgtgagagagggtccaattttaagttaagcagccagggaaggccacagtaagaaggtgacattgattcaagatctgaaggatatgagagtgagaatcatatttgggggaggagcattcaaagataaagaacaagtaaatagatcctaagagaggagcacccctggaacatctgagaaggagtcaggagaacaggagtgagtaagagagggtcagtgataggaaataggatcccaaagtatagaagaggtcacatcacacaggactgcgtaggccactgtaatgtctttgcacttcctcaatgtgagacgaaaagcctttaaagggttctgggccaagacttgacaaggtccaatttacctattaacagcatttctattgctgctgtgcctaaattaaagtgtggacaggggctgatgcaggggaatctattagaaaacttttgtcctaattcatgtaagtgatgatagtggatcagaccagggtgtaccaatggaggtggtgagaagttttcggattctgaatacactgtattttaaaggtaattccaacaggttttgcttgtagctcaggtgtagaataagaaagaggagaatcaaagacaactccaaagcttgggggctgagcaaataaaaggatggtattttcatgtatccagatggaggagataggaaattgagtggctaggggatggatgtagaagctcaattgtgttaatttgaaacacccaattggagacctaaatgaggatagaagtcatcagtaacctacgtgtttcttcctcactgatcttctctggctttgacctccaatgccctaattcaaatatctactttctaagcaaaggcataattgcatatgttggtaaaattacttttcgaaaccataaagcactatcaaatgaacattattattatttatacatggaaataccaggatgatgccataaaccccaagaagtgcctttcatttggtattttaacaatcaggctctaagaaacttgagtccacagtacctcagggttttggggccagaggaataaagactggatttttgcaagcaaatatagtgccctttatggaaaccttcacagtttgctaaacttttggaaaatgaaacacccatcattaaactgtaacctaaggggacatgaagaaacaactaaccatgcacacccacctcttctctcccgggaagtaaaagcattatgcgcaactaaaggaactacaagttcaattgagaatatgtaaaaacccatgggtttcctttttaaagaaaccagagtccatacttgcaatccatctcccacttccatcccatctcgcaaccaccagctctgccctcattcccactcgtcaaatcttggtagaaacagctgtcaccacaaaagtcatactgggccaggacagacagctggctctgtgattcacaaacaaattaaccttgggattttattttgagcaaaggggcttcctatcctatgtccttcatggccatccattttttgcccttgggtaaacacacaccaactcaaatgtcacacatggggctgaaggacatttggggttttcagggtcactacccactattgcttttaaaaaatatttcctcttaatcaaaggcctttatctcttgacaaagtttccagtgaaaaagtgtacctagtttaagtagccaactcatgcctggggtttagcttctcaaagagggaggggtgtgaacatcgttgttccattaacaatttaaggatcagctctcaaagtgtagtcataaggcgtagaattaacagatgacataatgtgatatttaaaagttttaagaaaccagcaaatacatgtcttgcagcacagcaccatctactgaccagacagagaaagaatatgggggtgggggaagaaggtagagagaaaggatgagaagggctgagaaggctggggggaagaggaaagtgaaaagaggggaagaggaaagtgaaaagaggggaagaggaaagtgaaaagaggggaagaggaaagtgaaaagaggggaagaggaaagtgaaaagaagggaagaggaaaagaaagaaaaaacaggacttcagatttccgttaatgcaattccacattccacagataaagaaacagagcccagaaagtttagctgaattcgccaaggatacaaaaggctctcaggtctcctatttataaggaaaattattttcacatttttgaggtttaaaaaagagctatcctgctgtagaatttgagaaattaatcatcatatatcaaaggaactgattagagagtgcagatatagacccatacgttgagtctgttatttttctacctttgtacaaaggcaattcaatagggaaatgataatctttacaacaaactttgttgaaacaattttgcaaaaactatgtaacctcaactcatagttcacatcttgtgtgaaatttttatacaccttgtataaaaattcaatatgtattataaacccaagtaaaaactatagaaccttagccgggcacggaaaccatcattctcagcaaactaacacaagaacaggaaaccaaacacttcatgttctcactcataagtaggggctgaacaatgagaactcatgaacacagggcgggaaacatcacacactggggcctgtcggggggtggcgggttaggggagggagagcattaagagaaatacctaatgtacatgacgggttgatgggtgaagcaaaccaccatcatacgtgtatacctgtgtaacaaacctgcacattcttcacatgtatcccagaacttaaagtataataaaaaaaaatggcacaaccactttacaaaagtctgacaatttctttatatagctaaatatacatttactatatgacacagcaatcctacttctaggtatttacgcaaaagtgaggaaaatttatgtttttaaaaaaactctgggccaactgtggtggctcacacttgtaaccccagcactttgagaggctgaggcaggaggatttgagcccaagagtttgagaccagcctgggaaacatagcaagaccccatctgtacaaaaaattaagaaatagaaagtggtggtgtgcaccagtagtcccagctacttggggcactgagattggaggatcacttgagcccagaaggccaaggctgcagtgagctgtaatcgtaccactgcacttcagcctgagcaacagagagaaaccctgtctcaagaaacaaaacagaacaatataaaattgtgtatgagcatttataattcctttaggtgtgatcacagaaaaaattctcagagctgtacaacagaaagagtaaattttgctgtatgtagatgatatcaaaaaaaatgtttaaaatggtctgtagtccggaatacatttttcaaaagcatggaattaaaagtatattctaccctcatacactatttgtttatataagtgaatttgttctaaaaaaaaaaaaggaaatatagaaaataaaatgaatagtgactcctgcctcaaatatcctatatttttaaataatggaaacttaattggtaagtttttagtccaatatgaatagttggttacattatgaatattttaagaatcaaaatttgttatacagagtaaggctaggcacagtggctcatgcctataatctcaccactttaagaaaccaagacaggagattcgcttgaggccaggagtttgagaccagcctcgggaacaaagtgagaccccatctctacaaaaaatacaatttttccagccctggtggctgatgtttgtagtcccagctgctgcttgggatgctgaagcaggaggattgccagagcccagtagttcaaggctgtaggaagctatgaccattctactgcactgtaggctatctgacagagcaagatcctgtctcaaaaaatatggacagtggattgggcgtacatttgttgcaatctttgaagatgcttttaacatgaatttttatccatatgaaatgcctctaaaaattttttctggtagctcacctaatacaaataagtgaatatacagttctgagtgctgtctctttcttttccagcttaaaatttacattcctatcaaccttcatggagccatacatttgttcctacaacctacatgacatctctgctccaaagagttcaaatgttgccccatatatgcagaacatttattgacttgaatttatgatgccaggagtgatagtaaatcagcgagaagtgggagaaaaactgttaagaaccctcacaacaatgaaagccagtttgccacattaatatttatctaatcagtggtttccttgctgcttcccaaggtctctagtccactattaaaatttgcctatttaacaattattttctatatgtctgttatgtaaggtattgtgctaaaaataaactcaggttattgtggtgaatcgaaagacaaaggaactatcctaaaacagctcaccatcctagggaggatatatagatacataaagtcagaaattatggcacaatagtatcagaatgatgatgggaagcttcaggagcacaagagaggaaggcagggtcaccaaagggaggggtatagagcatggtcagtaagaaaaaacaattatgagggcataagcattaacctggtttatgtccactaaccatccattcaccaggttgattgaggaaaatgggcagtaagagaagaaaatatgagcaaagccctaaaggcttagaagtctttggctttctgtaatcttgtaattaaagcttcgccacatgatgaagattatgcttggaaaatataaaaattcagtaaaactttttaaaaattcaaagcttgatttaattgatctgtagctatccatttgaagtaatccatttggtgttaagtgaaaacagagaggccaaactttatctagagaaaatgctatccctaaatgacataattacttggtctttaattggggaaaatactttggtattagagtgacattcaagaaaactgaattttcagagaatgtcgtcagtagggtaaaaagtaaagtgtgttagtcttcataacctttctagttctgacattgtacatttgaaggtagaatctgaccagactgatttctgatagatgttgttttagaaatagatagttactcttactttttatgaatttcctgcaacagaaatatcttgaacatttagtcatgccatttctttgcatcgaagttcatcattggtagaaaaaatatccattcattcagcaagtctttatttactgcctacaatgtgctgcaattcaaaatcctcattcgtattatgtacttgagtaataactctcatcagtcatataaagtcttaagatgtacacaaaatttcttaaccagtagcttaattgcttaggtaagctctccctcagacctcaaaagctgtaatgaaatgagaactaaaatgttgcaaagctagccatatttttgatctgtgccatttttaagatggtgtttcaataaatattattcttttaccatgccataaattcacctctctataactttaatagcctagtcataattttatcgttctcaattttagtgaatttgtatgtcttcaaccatcagtatttgcccttccaaaatatttataataagtaattcagaaatagattcttcacacctacaatgatctggtcttcaacaaattcgacaaaaataaacaatggggaaaaggcacatcaacaagaaaaaagaatcccattaaaaagtgagttaatgccacgaatagacacttctcaaaagaagacatgcaagtggtcaagaaacatgaaaaaaatgttcaccatcactaatcatcggaaggatgaaaatcaaaaccactatgggataccacctcaaaacaatcagaatggctattatcaaaaagtcaaaaaataacagatgttggcaaggttgcagagaaaagagaatgcttatatactttggtggaaatgcaaattagtttatccactgtggaaagcagcttggagatttctgaaagaatgaaaaatagaattgctacttgacctagcaatctcattactgggtacacactcaaaagaaaataaattcttctaccaaaaaggcacctacacttgtatgttcatcacatctctattcaccatagcaaagacatggaatcacccgagatgcccatcagtggtggattggacaaagaaaatgtgtggtacatatacgccatggaatactacacagccataaaaaagaacaaaatcatgtcctttgcaccaacatggatgcagctggaggccgttatcctaagtgaattaacacagaaacagaaaaccaaatactgcaagttctcacttttaagtgggtgctaaatattgtgcacacagagatacaaagatgagaacaataaacacgggagattccaaaagggaggagggaaaaaggggagaaaagaattgaaatactacctactgggtactatgtttactgtttgggcaattcttctacagctatttagctagaaacaatttcttcaggtcctcgtttctcctctgcagtaatgcagcatggggctgtgtgagatatcctttcatgtggataatgtattgctttgggcagaagaaagcactcctacaataaatcctctacgtgagctgctccataaggaacttgaaaaactgggcaaaacaatgcaagaagcaagcatgaaacttgaggttgttatcactgccaacacacaaagttaaatacatgcaactattaccaagtatgtctgcccaagctagtcaatggaccaacttctcactcactgtattttatatttataagccaagagagaaacacaacaaaaaaaaatctcacccttatgtttagaaggcaagaacagaggacaagaaaaaggtaaattttgactaatattcgctatttattttgggtagttattgttaactcttagaagttaaatcaaaagaaatgtgggattccacctgtcttgggcagggctagggaatgttcactctcattttcattatatcctctttgaagctacattcgccatgtcctcaattttcattacatatatgtcatgcacttccaaaactgaacctcatagtggccagagaagcagcatgttgagagagactcactgatgggcaattgcttcattacctcctacccacttgataactacagagattttgttcaagtccactctgtgaatttcacacttacagattcgtagccaacttaattcagtgctaatgccctctataaatctgcttggaaatcttgactagtcctgaacctacatatcatagtccttaagtcccactaggactaagaacttgacgtacagaatgaaatgcattcctcatctgcaactcctgccctcaatcccacatctacaatagtctccatcgaccccatgttgtttcttagaaaactgggtagaggatagtacctgctacagggaagatggctgagctccattcagaggctcttgtcatgtctgtatgcccatccacaagctttagtggactttgtttcacatggcttgcacctgtgactccattcagaagactgatcttgggcaactggagccactttgctgcccagggagtcagaagtacctgggaatttacaggcttcaaggatgaccaacaattccagtttgcttaagactaaaagatatctcaagataatttagtgtgaaagcaggatggtgccaggcaaaccaggacagctggtcacccagtgcaccccccacaccaaactccaaaaatggacagcccttaccctcaaatgggaacgaacttttgggtaaaactataccgcagagctccttgcaggacccagctgaggctgggcatttcctttgcttgtcatcttccattctgtgtctggtttcctccctctcacctccccatgtctgctggaagtacttccttcatgagtcttaggcacccattctcatcacaggggaacatttctggggatccccactgaggacacctgcctctctatgaatgttagaaaattgcatgatgtatctaccactgaaatccataaggcagtcacaaatttcacttcagccaaatttttgagcctcctctcctgaaacaaaactgataatggaaatattggcaagtagaaaaatccctcatcttgttaattgtttttgtgttgtttccatagcctcaggtcaacctagctgtggcagtgatggcagcagagggtgaaagcagtactgatgggccaagaaaaagtaaaaggaggaaaacagaatttaaataataaacccaagtgatcaagacgtgattatttcttctacagtggggcttaaaggctatttttcctgaaataagactaaaatctagagtacatttttaaaaaataatttgctctactacgatatgtagtaatgtattgatattatttatatagactttaaaatatgtttagaaactgtaactctgtaaaatattaacctgaactggaatggccctctttaaaaaatatataattttttttaaactctccttcactgacttgctctttcaatgaaccactgaggtcactatatgatgaggagcaatttgcaataatttaccaaaataataataaggtagctctatatcctgtgtgtttgatttttttaaaaaggagtttccctttcaggaccccatgaatgtacaaggttcaaacaaagtgcggggagctaatgaacagactgtgttttcctgtgccgggcccctgtacagaatgacttcattcagggctacggctcgcgcatggaaagtgctggtaaaaaatcccacagagttcagacgaccttttcctaactttcgtttttttttcccttgtttgcctttcgggcctaagccagggaaaacataaatattcatcagctgatatttgcagtagctgtgaagttatgaatgaggccatgcggctttcctcctatcccatctacagaatggcagcttctccactcagctcccagccaaacgacactttccgaaatccccaaagtgtactagaaggcttttcaaattcagtctttttttttcctttaatgctcaaagcagaaatgctgtctgcttaatgtttaccctaggattatagaagaagaaaaagaaaaacattgctttgccaagctttaaactttcagatgccttgacgtaacaggcaaatatgctagcagctcaaaatattggtagtatatatcaatggatatgatggggtcagggatttttaatatcaaacactagacagatacctgaggcatttattgtgtgaagggcagagaaaaaaaccatcgatttgacctggttctactgctttgttagcatctggacaggtgttagagagagatgctggaaaacagttttgaataagatttcaaataggtcctcaatgatgagatataaaaagaatgaaaattgtgcctgccataaggtctgggatggagctggtctttctgtcgtccagattcctcacaaattaatgctttaaaatctggaatcttttcatcttccagggtctgtcactcaaataaaactttagtagaaggtgaattgtgaatggaagagaccgtagggtaacaaacagcaaatagccatcagtgtctaggaacaaacaaaacctgttctgggctcagcataaccatatgtctttgagcttcctggatctggtccccgtaacacagaggtctgaagagtcaccttcagaaacaggaggcatctttgaaagtggtggtaaagactttgtcaacaacacttctgaaaattgcattgtgccaagaggcaacaagtgatgagtaacagtgataatgcaattgtggaacaaattgattcaaatagtactacagccccctctcaagcattcatttctacagatgactgctagactgtttggtgaatccaaaagtaaccaggattgtggcacaacttttgatacaagaaaaaggtttgtgattctaatagaaaatgacttttaaataatattttaaaaatgtatgattttgaaataaaaaatggaacagcaaaaacgtcaacagcacaacagctaatcaatcaatccccaatgattagtgaatgtaaagagtgagacatgtttttatagataaagaatgtatgtatcaatgtccaatattctccttttgactttcctcatcagtatgttttattcaaagctcaatatttggtctctccttgtctctgtagaaatgttacctacatgatgggtttattgggtaattttagggttggaagattatttgtaagaagtgtcactaactacaaggtcctacttggtgaaatattgtcgggaatattctctatttttgaattttcattcattattacagatcaggatctcttataatcattgttctgtattttttatggggttagccatattacctatacctgacagtggaaataattttctaaaccaccaaaccaaagagatgaagaaaagggtctcaggtgttcaaataaggaccagttcccagactggcaagagagctgactggaacaaatgctcgtggcttggttgctgtctgtttctccattctgaagtagccttgccaggcccagaatggaagccagaggccagtgctcaactgtgttctccttggctccagccctcaccagaataaggcctgatgaagagctatgggacagtgtcaaaggcaatgaccttctgcaggaaaaactggacagcatacaggagtgacggattgtcatgcatgtccagagacatttaggaggccagctgagttagcataggcaggaaaatatttcctctccctctattccttgcccaggactgagaattttgagctagaagtagcagagagcagaattagttgtccatccttctctatgaaactcattttgcaaatcacatcagatcacaatgtcaaaaagcattccagtttgatactcattacacttatgttaacagagaagaaagtcaccaggttcaaaagtggcctgtaaaatcttgtttacaagagattctatgttttgagcttggacagaagtaaacaaaatctctcatttggcaatttttctttgtcttgaaagggatatttacatgttaaagaccactatttgagttatatatttttttcatccctctgccttctctggaaatgctgcattttcccccatgaatacctcccctgttcaaatacacagctagaattttcaacaagacaagagaacattggatacccagaatcagatcacttgatgcatatcacaagtgtagctcatcaatgtggcctatgtaatttataaactaaattgagagatttttgacagtaaacagggcattattaattacactgggagaatgagtataaaaccaagattgttatgaacacactgtaacatatgaccatcctacacatggattcttctagctgattctctctactcttatcttcagttgccacttttgctatctagataatatgttgcttttctatgaggagatttattaacaccttatttggctgttgatcacagctataccaagttatcatcaatatgcttcacttagcctgcatcttcctgagattgtctgggaaatattatcttccttctgtcttctcctcaatgattttaatggtttcaaaagcatatcacatagcatatcacatagacaactgtgtgttctgcctatatgtagagctgacactaactcaataaaagtagattgttcatttccattgctgcggagagactactcagtggattcaaggaacagtattggctctctatactgaagtatgcttagaatcaagatgattagcaaggtacaaaagggtctcagaccacttccatggggtcagtgtttacacctgttagagaagggcacctttgtagaacagccactttaacacattgggtttggatttgagggttccatcatgcctgaggatttccaactcctctgtggtgaattccttttactgtctgttgatcttgaagtgtccaactgtaccttttttgtctcatatagttccttctgcattgtaatgtggaaaacaaaattgtaccacttcaaaggtgataatttttagaagtaataattgactaaagtctacagtctatttaaactgattaagataattctaacaggaatttgcataaacacacttttacttttcttaccattaaaccttgatgaattttattattaaaactgtattaattatctccagctctgtgaccattagttgactggccttgagtaagtcataatctttctggtcagttccctaaactacagatgaaggggctggatttttaacatttctcacacagcattccacagaactctggttatttcccatattaattgtacacattcacaaaggactaatgggaaatccctggtttaacaaatgagattttcttaccataagacttaagacacgctaatgggcagagtgtcttttcaaaccacaagactcaactttaagtttacatgattaatttatgcacatcaataataaagtaaccaagaagttacatttccaagaataaacacattaactttggaataacatgttaaactcccatcaaacattcttggtcttaaactgacattacggttctggatcactgataggtggttaagcaaacaaaataagacactactcatagtgggtctccagaccatttcttccaaagcatgtaacttcccagttgcaacgtgatgctgtatccattaggtattataagactaaggtcaaagaatatacagggtgccaagtacacatgaattctagaaaaataggtgattttttttttcagagtctcactctgttgcccaggctggagtgcagtagtgtgatctcagctcactgcaacctccgcctcccaggtttgagcaattctcctgcctcagtctcctgagtagctgagactacaggcacacgccaccatgcctggctaatttttgtatttttagtagagacggggtttcaccatgttggccaggattgtctcgatctcctgacctcatgacccacctgcctggcctcccatagtgctgggattataggcatgagccaccacacctggccaaaaagaggtactcttttagaacaagtatgtccaaaatcttgccaatgtccaaaatattttatactaaaaattatttgttgtttctgtgggaaacgcctattgttttgtttccaataaagctttcctactctggggaaaaaggtaccccttctcttccctcttctccacactacaacatttagaactcaaagtagcccccaattcatatagtgccctttcttcctgaccaagtttgattgggcaagagatgggcaagagactcaattagcgctctgctctcagataatattgaactggagctggaacaagagagtgaataattcctcgtggcagaaccaagagataggaatctggggagctgcagatggccatgtgcctcactaggaggaggatgccaacctagagtgaaaaagtataaaggctacattctgagggaacaaacctggagaaaagcaaaagtagtccttgttgctttcaaacccatggtcccaagtttccctgggcccaatcgcatccacgcttttcctgtggcttggtatttcaacacttcctgtgattgagatactaaacactcctccttttccttcacctggttcaagttgcattttgttctttccaacaaaagatcatgagttatgaaattttagttgaacattgtttaggatgcttagataaaaattaactttctcacaaagactaaaggagtattaattacttaccactttttaggaactaactcttgcacaattgagatgcagcatgtatcttcatccaactgatgtgcccagtactgagtattgggcacaccacaactgtgaggtgcccacagaattcttttttcaaagactggattgtaagactgcttcacagactacacatgagtaacttctagccacataatctgacatattttaagtaatgttaaaattctatgactttgtgatatttcaattatttattaatctcaatttgatagttatttgctatgagaatagaatcaaataagtatttaaatgctgcaatctatatttgagaaaatcatactttcatattataatattctctgtttatttctgttatgaaaattaagcatatttttacaatagcagtttatgatcatgaaaaattcttataaaatcaatgttcttaaaattttccattaaatgttgtgattttacattttctcagtggcatacttttaagtctttgctatatttgattctaagcatagaatgttagagttttttaaaaagtcagtaatatccatgacattagttaacatgtttattagttaatttaacaaatatttactgaatacctatagtttttatgcaaggtattggtaagatagcaaaaaagatacatttcctcctttcatgaaaatgacagtctagttctagcactatttcctcatcatttttccatattgatgcttcttctgtgcttaggacgacattaagtttacccatacgtctacttaacagcatgtaaggaagtaaagatcatcacatgtcaaccccaagactatgatggattctataagcatgacttgatttccaggcgtctttcccacatgctttctcacccctgaaagcgttcagtgtggccagaactggaggcaatgccacatgagtagacagaccgccactgaagggtggtctttctattgttccaggcactgtatttctgttaccaaagtgcagagcagaaagcaatgtgccctgacagaaagagctctttgtcaggagtccaaagacctggatggcagctcttaccccaatactcatcagggaatgacctcagtgctcagagaaatatctaatggcatctggacaacctctagaaaattataggttgtgtccaaaaacttccatccctgcaaactttcctctcactctctatatgaaactgcctacaaatttttaaaaatagtatattgctttaataattgaaatcctatcatgtgatagcagaggacatgcataattactgattttagtaaatgctttaatagtgcagacaaattctgattatgaacattttctgataggggccaatatttctgagtttcaaatgaatctagactggaaaataatgttggcttttataatgaatagactactaagaatacctgatttatgctttattcctgaacaagagtcaaaaagacagaatggtcaggagtacataaaataaattataattgataggagagttagattcttgcaggatgtgagtcttattttgttgttatttttgttgcagctgtatcatctctcatttcccctctactgggcaaggtaaaagacattagaggatcatgtaaacctccatcatcaggaaggtttgaataagcaataggaatgtaaatatttgtgaaaacaactagagactgaatagttgtaattgattcatcatatataattttaattaacatttaaaataaatgttgttattttattaacctgaagccttgaagaactttggaagcaggagtgttaacaaagaggatgtttagtagaggagggagagattctcattcctgaacttctggaaaaaggacgtctctctaatggggaggcagtttcgacattaacctcccatgtccttttaaccactcccctccagagaaaggcccaaaactgtggggagtgctctgctttccacagaccttctttatatgtttagttgcttgcacttgcatcattttctccatcatttgcctgcccaataaaggatggacaagagatggcaaaagagttcaaagccaatcaaataattctggataaattgttaacagacctggaataagaatagccaagaaaaatttagctaaaataagatttcgggggaaaatctgtggatttcatttagattgtgtttacatgacaacaaagtattgggttaactcagtggaaagtaggcaaactgtttatgcagttatgtagacaaaacagttgcatcagtgattaccttttcaagttgtggattctggctttcttatacactgccctgcccataatgatgaatttataataactgcataaactaaatttttggtagattagcattttactaatttctgagtcttccaatattttttgtggttttgtgcagtttgttgtttgtggtgcttttctatttatttatttattttgtcatatatgtggctgggaatcttggaaacagtgaatgttagctttattaagtcaaataattgaagaatttttaaaaagattttcttcctgactacttttgtggtgtattaaaaccaaaatattactacttaaaacagggatgttcacactatgacacatattatataaaattactattattcagaaattcttaaaaaaagacttgagaaatattgctctttagtacttcaactagatagtatggttatagtatcaaataatatttaaaccaaaattcaaaccaacccctctgttaggtattgatatggtttgaccatgtccccacccaaatctcatcttgaattcccacatgttgtgggagggacccagtggggggtaattgaatcatgggggtgggtctttcccatgctgttctcatgatagcaagtaagtctcatgacatctgatggtattataagggggagtttccctgcccaatctccctctttgccagtgccatccacgtaagatgtgacttgctcctccttgccttctgccatgagtgtgaggcttccccagccacatggaactataagtccaattaaacctctctcttttgtaaattgcgaagtctcaggtatgtctttatcagcagcgtgaaaatggactaatacaggtatatacccaaaaaaaaggaaaccagcacatcgaaaagacagctgcactcccaggtttgttgccgcactgttcacaatagccaagatttggaagcaaccaaagtgtccatcagcagatgaatggataaagaaaatgtggtacatatatacaatggagtactatgcaactgtaaaaacaatgagatcctgtcatttgcaacagcatggataggaccggaggatcattatgttaagtttaatagccaggcacagaaagatgagcattacatgttctcatgtatttgtgggatgtaaaaatgaaaacaattgaactcatggacatagagagtagaattttgtgtaacacagaggctgggaggggtagtaggggattcaaggggaggtgggaatgtttaatggatcccaaaagagtagaaaaaatgaataagacctagtatttgatagcataaaaggatgactatagtcaataataacttaattgcacattttaaaataactaaaagagggtcattggattgtttttaacaacaaggataaatgcttgaggagattaaaaaataaaacaaaattcaaaccaaaactatatttttgtatatgggatagctattgtctactattattcagaatattttttaaaaactgagtggtttgcacattaataataaaactaaataacatagtattaaaaataaagaaaaatcagagccaaaatatgttattggcttgggcaatgctatttgttcatatgataaagaagcctgtgttcttatgtcaaggagatgcccacatttcttgagaaagacttcttattggtgccattttgctgtttaggatacagggtttcattcactctgctggaaatatttcattatatctaaaagttttgttcattctttccagatttccaagatataagtcattacattacatgccaaatatttttattactattcttttcataatagcttacacgtgcattatttttactgtttgaaagcatcactacttgtcattacgtcttactgattagctatattactattccacctaaaggatgaaatctaacattcaagattattttctcaagatttgtcaagtttgacttgagatttctcaagtttgtccactcaacagctgggctgtgccatgaactctaaactttagacaaaattattgtgcttttctaggttatccttaccaaaaaggtaacagtaaactgaatggaaagattaataagaaaaacaaaccaaaaataattccataaagcagctttagatcaatatagcattacccaaataattttaaaattttattatatttgttattgcaattaatttacatgctatatagaataacttataaattgtattacatttatcattgcagtttatctgtctaccataagggtaagagctactataaaattgtatttttttaaactggaaagctacatcaaaaagactttatatgacttcgccaggataatcacatagcagggttggtcaacttaaactagtcttgagtctattagattacgtttccccagtgctcaattttattcataacatctagatctgtgctattcaatacacacccactaggcacatatgactacttaaatttaaattaattaaaattaaataaaatgaagcattgaaactagacacatttcaagcacccaatagccacatgtggctgatggctactatattggaagtgcgggtaacattttcatcatcacagcacattcaccagatagcactggtctggataacaaaaacctctaaggaagtttgttgtcaaagaaaaaatgttcaataatttataatataataaccattgctattaatgtcattataatgtgtttggtaaggatcacatagaaaagtagagaacaatgttgtaagaatatatgttaataattgatatgagacttatgctggttgttttttgtatattcaaatttaaaataaaatacagtgggttaggcatagctgtgcttcacaattgtaagccatgtgacatttagctttaacttagcttaagtcattgaaattcaaagacaaagaaataattttttagacattgggtttggaaagtggatgtggggagattatgttaaaacatcacgagcaaaagagtaagccagtttttatttcttcacataaaattcaatgccagaaagcaatccaaaatgtctacaaacagaaaatgtgaccccaaagtagtatacctatccatggtgtcattcaaatacaagaacatcaagtagatttttaaacatgcacaaacttaaagaataccagctatttttgaaattacagttggccagtgaaatctagggaaccaggaggtgaatcaaaggtaagaaccagagaatggagaagctatgacaattataagtaccgagcccatttaaatgaaaaccagtattaaacaattttggaaatcaatgatagagaagacaatgatttatactttgataatttaaaaattatatatatacatacatatatatatatatatatatttttttttttttttttgagatggagtctggctctgtcacccaggctggagtgcagtggtgtgatctctgctcactgcaagctccgcctcccgggttcatgccattctcctgcctcagcctccgcagtagctaggactacaggcgcctgccacaacgcccagttaattttttgtatttttagtagagacggagtttcactgtgttagtcaggatgatctcgatcttctgacctcgtgatccacccgcctcagcctcccaaagtgctaggattacaggcgtgagccactgcgcctggccctaaaaagcgggtgcagtggcttatgcctgtaatctcagcactttaggaggccgaggtggggggggatcacctgaagttaggagttcaagaccagcctggccaacatggtaaaaccccatctctactaaaaatacaaaaattagccagatgtggtggcacatgagtgcaatcccagctactcaggaggctgaggcaggagaatcacatgaactcaggaggcagaagttacagtgagccaagatcacaccactgtactccagcctggatgacagagtgagacttcatctcaaaaaaaggatatatacatatatccttttatatccatatatatatatatgtacacacactaaaggggaagagaagaggaaaaaaggagagtagatgtaagagactacttcattttttatagcaatgagttaactggtgctaaaattaaagaaagtgtatgccataaatcaaaaattactttaatcttttaagttttcataattttccaaatacattgtgtaggcacttttaatctacgatatatctttttgaaaaaaaattaccttaattttaaatgtttccaactttacttttccttctacaaattcaagtaaaaataaattgaatctcttactcaaatataacatgtattgtatagtcctattttagtaaagctgtaaccatccaacaggttcattttgcccactgcacagatagagccaaattttcaagccacaaattggcaatacagaaagagtttaatacatgtagagccatctaaacaggagaccagagctttattattactcaaatcaacttccttgaaaatccaaaggtgaggatttttcaaaggtagtttggctggctagggaatgggtaatgctgactggctaaggatgtaatcataggagtttggaaaatggtccttgcgcactgagtctgcttctgggtgggggccacaggaccagctgcgtcaagagtcatggatcagtgtggggccgcccagtcctcagaaatgccaaagactgaaaagacatctcaaaaggccaatcttagggtacacaatggtgatgttatctgcaggagtaattggggaagttccaaattttgtgacccctggaataaaggctgatcatcctttaggcctacatcttaacagaatttaggctcctctcatcctccttagctttacaagggctgtttagtttttaagaagggctgttattatttaaactataaactaaatatctcccaatgttagcttggcccaagcccaggaatgaccatggagagttcagaggtcaaaggtaagatggaagttgattagatcaggtctttttcactgtcataattttctcattgttataatttttgcaaaggtggcttcaaaaccacttctatctatccagttgctactgattattcaaacacagcaaagtctgagatgatattcacccaatataaataacatttatctctctgtggtaaaatctgtggtgatgtttattttactctgtaaaatattcaacttttctctaaataaatactataaaataaaatacttattagaatgtcttttattctctttcctgataataatcattattaaactattaatataaaataatattttcctttgactgttgatttacagttcatgataaattctcacctatttcaccatgctgtgttcataatgacccagagaggtagacagatgctgccgccctcatttctcagctgagcatctgagggtcctcagattacataacagttcacccagctaatcattcagatcttcaggattctaactcagtgcttttgagcaggttagtcttgatcttcattaagtttagtaagaaagctcgaacataccatgtaaagaatcttaccatgaaagactctatcaatatgaagattccactgttagaaacagactcaggatgttgactgtaatggaaaataaatcagcgttaaagacagatgatctaaccagaaaagatacataggaaaccaagcaaggttcttttcccctgtgatgctgaatcaaaggaacaaacaaaatcaagcctatcactcacttgaattccagctcttcttttggcatcattcagggtaacacaattcttaatttttagaaggtcctggaaaactttcaatagaacttatactcattatctaagatcagaaaaatgtcagtggaaaagcaaacagataactggatttaaaaataaaaaagtatctttttctttcctccaacaatgggcaagtacattagggaggaaagaagacacctattgctcaagtttgatttgggtaagaacaggaaattgcatcttttagaatagatgagatttcccatcacataaacatataataatagcctcctatcatttgagctaacatttacattacctaaaataaactgtcatcctgatgttgttctataattggcatgtgacagaatgcacgctgaggcaaatataagttcggaaagcatcctgtctttatgttaaaagaaatcttcggactttcctaaacggacaaactttattttgttgctatgcaactgacatggaacatagtccatcagacagtaaataagttatgaattttacaatgaagagaaaagtcttttctctctgtttgagaacaagccacaacttcctttcatggtttcctaatccaccacagccctctaaagctgtttcacaaacgccaatgttttggcaagataaacaagcaaatgaataacacagcaatgacccaaatgcagtctgcaaacatcacgctaagaggcatcaatactattcaattcattcctacaggcctgggaacctgggctccccaagcctcgtaaagagaagaaggtttgtttcacacccacattcttccaggtagctgaatataaataagcttaaacaaaggagattctggcaatttctgttggcaggcacccatcactgctacaggtctcaggcattattctgtatcagggcataagagtgatttcagccatgaggaaaacatctgtgaggataaaatgttttagggttcagacttgtggcttgtgggccacatccatgtttaacatgacctgctcagtgttcaaaatgttaaatatcgtccaatatttaaaattttttacataaaaatctgaatgtcttgcatttcttgaaaaattataaaataacactgaatttgcatttttgcaaaaatcatttagaatcaacttccagcagaaaactggaaaaaaacccaataggataagagatagataaattgtggtacattcctacaatggattactacagagcaataatcagaactaacttctgatacactcaaaaacatgaatggacttcacatatgttaagcaaaagaaactaaacacaaaagtgcacactgtatggtcccacttatgtgaagtgtaaggccagtgaaaaccaatcaatggcaatggaaatcggcataggtttatctctggtagaaggagtatgtttggagatgatgaaaatgttctgtatttttatctgggaggtaggcatataggtgtaaatgtaaagtgtagccaccgatacactcaggtttcagcaccttacacacctcgctgtatgaatttcatatgtcaataagaaatacaattcaatggaaaaggtatcaattggctaaggaacagctggccttttaaggtgaggcttggcctctctgcctggagcccacacccaatagctggctcacatagatggctgcaacagaatccatggtgtggggcccagcaatctgtttcagcgagccctgccattgattctgatgcactatcaaagcttgagaaactgctctagagcactatatccacaaaataacatacacaaaaggcagaggcggccgtaatgaagccctgttacccctcccgccaacatatttcaagaaacttaggaagagaggcgtttgttggcttcctcaaagaaatctgtctatcaagcctaagtttcaaaactcttggaagggattgtacaactaacacacaccattcctcttttaaccattacacacttttgatttcagtactgttacaattgggtccatatcactcattaaaaaaaagtaaaagcaaacagctgtatatctttgattatgaaaaaattatcaaacaaaaagcattcagatatattccaactctgaaaaaataaatgaaaatctacattcaaggagttattgtggctcagggaatcttaaaaattatgagaaactcacgaattaagaccagtaatccccattctcactgttacttgcataaaccttacataaaacaccacttggagatctctattttctgggaagttatcaacttttaagcaagcgcccacacaaccacacactgtgatgtagtcaaaatggaaattctgtgccaacagagaaggcattttgaatctgttgagggaattagaggtgcttactatatacttattcattgatcaatattaattggaaaagcataaaacaattatatgatatgatagaaatatttactctgcgtattttgagaaaaagttaagggataacttttctttttcataaagttaagtgattattttttaccagactggtatataatttcagaaaaaagttttttgtgtgttcatgctaatatttaggaatctcctagcatttagaaggagaaagggagagagaaagagttctgggaataataaagcataataataataaaacataatataataatcatattttcaggtagtgattctctgaattgtttcattaagtacctcacagtggttgaacaaccagagagatgacgaaaaatcaacttcaaaattactttggctacctagttcacctccaatttgtaaaatgcttggtttgggaatgaatataaaagtcacgtgatcagggcttcatgggcatgctcctcatgcagtggacagggctccatgctcagaaaggggacttgggcttagggtttgatgctctgtggttattggcttgaaatacttaataatgttatcattgaatttgttttataagtgatgcacgatgcaacaatggaacttgtgccggggacactgagagcctagcatcatacattgttccatctcctgccacctccccatgtctgctaagtgagttcttggttgctggctcaggcattctgcttagtatttttgccctgcacccccagcagggttctgggcatgggcacaggtaagatcaaggcaagttgtaaggcaataccccaggcacctggaaggctctacgcttgccatgtgggtatccccatgcccaaggaagcatgacatgaaacagcaagtctccatgacagcttaagagaaaaactgtggaaggaaggaaaagggttttgtcttgctttttgaacaaggggcccatattttaatttggcatagtcctcacacattatgtagctacccttgcacatggttatcaatggtaaagaatcaaaagagtaaagaaagagaagtaggaggtataggataaccaataaggtatgcagaaaggaaacgaggaggtaattaaggttcagaaaataaaattaaaatttcatattgttacaaaaggactagatatattcttcccaaaaatgctttatttctctctaagaagtaacatacatcctaaaacatttggatatattcagacactaaagatgtgattggaaatctacattcaaagaagtatcaccaattaccgccacccattccaattctctccagtgctaccttctcaaagttgtgaatcaggcattaccaacactttgaacctgagcttacaatttaagaaccactgttttaaagacatgtaaacagaatacaggttaataaacaatgagatcattatcttttcaccttagtgtttgctacctccaattttactaaaggatacagcactttagcctgccaggggatgacgttgtctaaacacattttcaatgttttctttttaacagttaatatatttccaggatgaaagtccatttctttctaaaaggttcctaggacacccattgaaaagtcaaaagcaatgaaataaaagggattgctattttgttggaaaagaacgacaccctttgtattgaagtggggaattacagactgtggtcaccctctgcacagtgtctctttgtcaagtaatacatgctgaaaaaaaataatacagatgggaaaatattgtgcactgtcagatcttggaaacggccaaaggatttttcctcaccaatgtcttgtcgatgactttcacattctggcaccctgaaaaaataatgcatacatttaatatgaactgaatgcaataataatcaggcaggtaatcgttttcccaaggaatgtaaaatttgacaaatgtaaggtttatgattcaaggtaggcttgccaaatcttatgtggcatgagaccattttttattacctaaacagtccttaacacaaaatgactggcacatatttttattaacacaaagagtatattctttctgccacatttaatagagagtcagtgactgaaagctctcttttaggatatgtctgtagcaaattaaaatgcatagtgaggattcacagaatggcattcttcttgttgaggctctgtctgcagactgagtacagtagtgagtagaccatttatctggggagttttatctatgggaacaatccagatgatatggattacagaaaaggaagccctctttaccttcaaaaatgcggtagctgataatcaactcacagccattctttctagctacaggttctttctgagtcaaattagaaatagtcactagtagtattttaatgtgtatttatttatttattctttcagcaaatatgtattgtttgtgtgccaggcactgctgtagacactgaaaatactgcaatcaagacaacaaagccccctgcctcatgtatcttatgttctaaaggggaaacagacaatatataatgcatataattttaaaaggaaattctatgatagctgatatataggagacaataggtactatggaaaaaggatgaaagaaaactggaaaagaaaactggagtcgaatagatgggtggaggataaactgctattttaaacacagtaatcaggataggcacctttaagaaagtacaatttatgtgaacacatgaaagatgagaagtttttcatgtagctgtctggaggaagagcatccaggcagagcgaacaaccattgcaaataccccaaggctgaaacatatctcacatagtcaagggacatcatggaggcaaaatgtcacatgggcagaataagtaagggtgacattggtagaagttgggatcagaaagatgacgggagtcaaaccatatgaggccttgtaaaccactataaagactctggcatttactctgagtaaaccaaaagccactgggggttttctgatcagaaaagtaacatgatctcaatgaatgtttaaaagaaccgttctggccgccatgatcagaacagactgggagaggggagataggtgagaatagacgtgcccacccacaatgtccatgggatgagagacaatgatggctccagccagggcggtggcagtggagatgacagggaggtcagattctgattatattttgaagatcgagcccctatgagtaagaaggtgtgagagaaaagaagagtcaagaatgactgaagatttttgtactgagcaactgaaactatgggattaacatgaactgatggagaaactgcaggtggagcaggtttaacgtggaaagttagcagcttagttttggacaggtaagagtttgggatgccacttagatgtccaaagggagctgttgactatccaggtagatgtatgtgttcatgtgttatgagatgaggaagaatatgatgttacaaccacctccaagtactcgtactcaccaaaatattcctaataaagctgtgaaaaacagaggttaagtaattactagagactgcacatgcagagttcctcaaagctgtaaatatggagtcaacgtcaaatttaatgtactcaaatgatcccacactcttccctttcaaattcacttctctccaccaaggaccttgacttaaagatcataaaagaaaagaaagttgtaaacaagaatgagtcttaccactcagagccatggccaaccggaattcttcctttagtatctcgaggacatcttgaacacctttctccccctaaccaagtgaaaagatacagagtgattcagaactaaatcagtctgacttgttttattcatttgttttactgtcaagttgtctattttatatattcatttctttgtccagttacctggaaagctaagccccaaacgattggtctccccacaaacacagccttggcgccaagagccagagctttcagaacatcagtgcctttccgcacacccccgtccaggaagacttccaccttcccttccacagcctccacaatttctggcagaacatcaatctggggaaagaaaagttcaataatgtgactctattaacactgaattgttattcaactccacctccaaaaaccactgacacatccagctagggcttagagtgaaagaagccaagtaggtttggggtaaatggtaaaattatttccttctcaaagaagagaggtacaaatgctagtaactaaaacaccaactaaatttggaaatgagcagcttatttttcttttaaagtgcaaggttgtctttttttctgtttcttatattcaaagattgtcatcaaaaaattataaacataaaacacttgatctttcataacttttttgtttttttttgagagagggtcttgctctgtcccccaggctggagtgcagttttgtgatctcggctcactgcaacctccatctccagagttcaagtgattctcctgcctcagtctcccaagtagctaggattacaggtgcccaccaccatgcctagctaatttttgtatttttagtagagacggggtttcatcatgttggccagactggtctcgaactcctgacctcaagtgatctgcctgcctcagcctcccaaagtgctgagattataaaatgtataaaagtaaattaagtattttattgacataaattattctgaacattactcattgcaagtcaattgttaaaattcatactcagataatagtgcaagcagtgtgtaaaatgcaaacacaactaataataaaacaacttagtctcttattttctcatccaaaatattttgcatccaaccatatattaaagaacactctgtgaaaacatttttcttgtttttaaggaatatgaccacttgcaacataaagatcttggtcttgattggcagttggtgatgatggacataggttggcatcaaagtgcacttgcctgcaccttagccttggaaactttggctgataacatgtgagcagagctggtagaatgccatttctgagcataggccttaagcaacctcatgtattcccacttacttttttgcaccttgtcatttgccatgagaagaccatccaccaggtattgtttccccctcatctttggccccaggataaatattcaggaagcagagctagcacagccaagcccagctggagctgacaattggataccagccacctagctagtaccaagcctagatcagtagacactggtcaatacaaactttcatggaaatcatttatttcaatgatttaaatcactgagtttgggattgttcattttataatgtcatatggcagtagctaactaatacaattggctactttgatgtgaatctgcatttgagaattaaaacaatttacaaggtgagctagaggtcaaaatctgtagaaatcacccacattcatcccaaaatgtaaaaatctaaattaagtacaattcctatttaaaatgtatgctgaggaagctgccatacactcaagtccaccttttccagaaataattgtgctgaaatcactcagaggttatcccacttctaccctaaaattttagagggttttatgtatgaggctgaagactaaacagggctacagattggaaggaagtgaaggtaacacttggcatgtggtccctaaatgtttggcaggtaaggcgattttcctctttcccttttagcttttctgccttgccaaacatgctttggatctatttacatatgtcccttttcctatacatagccctctttttgcattcaggcaagttacatcaacatataaatgctataatttccaagccatgatgcaagctataattaagcatatttccccatttgaaaccagaaccaaaaaaaaatactatctagcttgggttcaatacacattttcaaagtcagtcaaatcaagtgtgtttaggtaatttccaatgccaaccctggcctaaaagtaaactaataaaggtacttaaaaatgtgaatcctgagttaaaaaacagagcccagatttgtgtttcgtgtgtctgtgaacaacaatgttccatctattgctaggtgtttcaatcctcccttttttctttcaatagctgcagttttactaggtgtatattacacaaaataattctgatcaaacagattagataaataaatacagtagacagactcactatgttatgtccctgtttatgtttccctcttttcagctttctatacatctgtgagaccattcattttagctatttccttagtgcttcttcgggcaagtaattgtgggtttaactccactggagttaatctccaggaaaatatggtaagatccctgtatactgttgctcattcatccctctattcactgttttatcaaacactttataaaggacctggtatatttaaggcactaatgtcaggcagagtaagggatgtagaaagaaacccacagggatctgactcgcaaagagaatcctctttctcatttgtgttcaagtcacactcttccagaatgctccctgcacaacttgctcccccaacccctcccccaaacacaacttctgctagcaaggagctctcacctttccatcttcctattgcatcggttgttatactcttgatttttgacattttaggtatggaaacctttgttcaaatcaaaatagtttaaaataaacaaaagtagatggaaccagaggtgcttagttaaacgcaaaagagacagagtccaagtcactgcccataaatcctcccttgactgtctacccaccctacccatcacacttcaccacgcagccctaaggggcttttcctaagcacacttagaaaatcactggttcatatacattttgctgattgtttgcaactgcaaaaatggctgcaatgatctcctctttatcttcatttccttgcaacattatgggagaaagggaaaggaaggagggttctgttctgccaccttagatatgaattgaacttatgatttgctttcatcagtggaattgagagaagtgacaggatgcccattctaagcctagatctcaggaggccttgcatgcttccactcactctctaggagacctgccacttcatgagaatgctggaagatgtgagacaatgcagagccatccctgctgagctcatcctatgacagcctcctagtaggcctagtagctggccacagacacatgtgaatgagtccagccaagaccagaaaaacactgagcagatctcagcccaaattgccaacccacaaaattgtaaaatgtaataatgacgattgtggtttagccagtaagtttcagagtggtttgttacacagcaaaagccatctgatacattaaatgtttctcaaagatggaattgcatggactctttttatagaagaaaatttaaatccctttagcacttcacagaacatccccaagaacttaacaacccaaatgcttattctataaaaatgttttgccattgataattttcactgtgaaagaaagtcattatttctaagcttgaggtagtttgtgtccagatagcatcaaaatgaaaatgaaaaattgaaaaaaaatgctcataggattcaaatactccagagaatcttaatttgagaagatctagtgctatgtattttagaaaccaatttgattccatcctattattctctaattacttcaaatccaatctggatcacattataaccatgaggtgataagcgtatttttaacacaatcttattttttagtttttctggggtgtagcagaggctggcaactcttctcagaagcaacatattaagatgaactgaagttaaattattgttctaggactcctagtgacagtaagtatttctccacataagcaaactctgtgatttatattagcctggtgcaaaagtaattgcagtctttgccattaaaagtaatggtgaaattacttgtgcaccaacctaatagaagtgtataattcatattgttgtccactttctttttgtaagcaacacaatactgtgaagatgtttgggcttaaaagtctcattggcttactcacctagcccttatcccctgagaaaggtgagacaagactcccatttcggtgctcttcccatgacatcatgctgcctccatggctctgacttatgacataacaaaatctgcagtatagcaagttcttctgtgcaagtactgagacctggacaccacagcctcccccaagacctttaccgctcacagaaaaacccacacactgagggaactttgtactttgcggtacaccaaatgctttctcacatttctctcatcatcatgagccttaaatttgctctaaagtgtgaggcaaaactcaagcaagtatctcccctcatgtatacgacatgcaaagaggagggttatggtttgtttttttttgttttgttttgtttttgagacagagtcttgctcttgttgcccaggctggagtacaatggcacaatcttggctcactgcaacctccatctcccgggttcaagtgattctcctgcctcggcctcccaagtacctaggattacagatgccaaccaccatgcccggctaatttttgtgtatttagtagaagcagtgtttcaccatgttgaccagactggtctcgaactcctgacctcaggtgatctgcccgtcttggcctcccaaagtgctgggattataggcatgagccactgtacccagctggttattgtcttttgtttgttttttaattttaaatttttattttattttccataagttattggggtacaggtggtatttggttatatgagtaagttcttaagtagtaatttttgagattttggtgcacccatcacctaagcagtatacactgcaccatatttgttgtcttttatcccttgccaccccctattctttcccccaagtccccaatgtccattgtatcattcttatgcctttgcaacctcatagcttagctcccacatatcagtgagaacatacgatgtttggttttccattcctgagttacttcacttagaataatagtgttcaatctcatccaggtcactgcaaatgctgttaattcattcctttttatggctgagtaatattccatcatatatatgtaccacggtttctttgtccactcattgattgatgggcttttgggttggttccacgactttgtaatcgtgaactgtgcttctataaatatgtgtgtgcaagtatctttttcgaataatgacttattttcctctgggtagatagccagtagtgggactgctggatcaaatggtagttctactttcagttctttaaggaatctccacactgttttccatagtggctgtactagtttacattcctacctgcagtgtagaaatgttccctgatcactgcatccacaccatctactgttttttgattcttggattatggccattctttcaggagtaaggtggtatcacattgtggttttgatttgcatttccctgatcattagtgatgttgagcattttttcatatgtttgttggccatttgtatatcttcttttgagaattgtctattcatgtctttagtacactttttgatcagattgtttgttttttttcttatttgtatgagttcgttgtagattctggatatttgtttttcatcagatgtatagattgtgaagattttctcccattccatggattgtctatttactctgctgacttcattttgctgtgcaaaaagctctttagtttaattaactcccagctatttctctttgtttctattgcatttgcttttggattcttggtcatgaaatcattccctaaaccaatgtctaaaagggttttttcaatgttatcttacagaatttttatagcttcaagtcttaggttcggttattgttttttaaaaaacggtctcagggaacaaactcaaaagcccttctagacgtgtccatattctctcagcgagagggaaataagcaacaccatttggctatttttcccttaaaatctagttagatttgatttcagtagatttatatttaatttttagaaaacaatttggcccgcccactaagtctacatctccatacacaagtgagtcatgaatctgagaaaaagctttgtgctgtgaccaacctctccaccctactcagaggaggtcttcactttccacgtctgtttacctgcaaccaacatttaatatcacctagaacagtgtgtctctgggagcaaaactgagttgcaaagagctgacaacttccagttttcattacttttcatcttttgtttgtttgttttgttttttgagacagagtctcactctgttgcccagacttgagtgcaggggcatggatctcggctcactgcaacctccaaccccctggttcaagcaattctcctgcctcagcctcccaagtagctgggattacaggagtgcaccaccatgcccagctaatttttgcatttttagtagagacggggtttcacacatcggccaggctgctctcgaaatcctggcctcaagtgatccacttgccttggcctctgaaagtgctgggattacaggcgtgagccaccacttgactgtataatcctacaatatacaaagacttacttggttcctaccattagtgctttaggaaaaactcaacgcaatatgcacacccaatattccctgccatcatttactccgccatcacagccacacaattggtctatgaatgtcactaaatcaacctgctagttcagtgaaacaacagaccactactagttggctaaagtatttgttctactctttttccagttgtgtggataaattcaaatggtcatcccaattccaaccatctatataataactaccactgaagggttccgataaaagggaaaatatttatataagaatccagttctgagagaggtggtggtctggaaagttcacccacattacttagtagatagatagataggtagatagatagtaaatatatatatatgacaaatatatatattacttagtaaatatgcatagatatataaagttttgttatatgatgctagttactttgcctgtgtaaatcacattatgaaatattacagttgaaaggtttaaattttaaaagatgaagaaaccaagatagggagcagaaagcaattccctctgtccttctgcagttcaggccctccttctctcttttcttggctatggtaattttaaagactacctcattggcctttctgcctcttgtcatgacaaaatccactttatgagactcattgctgctaagccaaggctcttctattgcacacccaatgactcataatagtcaaggatctccttccttatctatccaggcagatgcatttcccaaaactctcccactcccactgaaaccgcctttgcaaaaattataactgagaaaaatatgtcagtgaaagagatctcgcctaactgactccatcttgattctaacggccaagctttccttgttcattgctgagtgtaggccagactaactttgggagaaacttagttcatacttcaattttgaaacaaagatgataacagctctttaccaaagcaaaaccccattcctgcctggggactaggctgcctttgcaggactaacaaattagtcacaagattagaaattatggtttaggagtcatgcagctgtaggctacaagattctgaacctccccaaattgctcctggggataacgtcaccattgtaaaaccgaaaagcaatgcttgagatgttttgcagaccctgtacctggatcagttggcaccactgtctgataaactggttcatctggtattgtggccttcaaccaggaactgactcagagcaagaggacaattcgactctctatgatttttatctcccacctgaccaatcagcactcgccactttccaaccccttccccaccaaattatccttaaaaaccctaaaacccagtttttcagagagactgattttagtaataataaaactccaatctcccagtacagctggctctgcgtgaattaaactcttcctctattgcaattccccgtcttgataaattggctctgtctatacagtggacaaggagaaacggttgggcagttacagcatcagacactgcaaacaagatggattatttagtattccctgagcacatctcactctttcccattttactcttaggcttatcacactgcaaagagggtccacatggggccagagcagaagcaaaaaatatctgcaacatcattgctccatctacaagaggcttggccaaatccccacaagtggacagcacataagggaaccacttgatagcaccccaccaacggcccccggcccccattctggatcatggatccataaaatccaccccaggaaatgtgtccctctccatggcttcggatccatttctggacccccagtctctgatcttaaaatctgccctaagtgcctctgtcggttttcttggctttaggatcttcagggtctaattgctcttcgatacagttgtattcagtcccacacctttcaggacagtttagttcacttttacatctagattttggactctgatttgcctactccagtgcataaaaaccaaagatgcacattggaatctcctgatagctttaaaaaaatactagtgcctatacacccctaagccccaaccagagattctgataaatagacctggggagcagatcaggattctttaaagttccccagatgattccaatgtgcagccaaggtggttcacaactcagccagagtagcctatttgcagctcacttcccgttgcccggacctaagccttttttctccttttcccaactctccaccatttctctgcagcttttcaaccgccaccccacaggaaattctgattatgtccctcctcctgatttcttgtctcaattgtactgatgatctcagattctaccacagcctttgaaatcccacaattctctgttagctcatgtccttggacattcatggcataatcctttctttcatactccagtttacatacctattggtgtatctatgaatgccagaataatccttgcccacaaatgacttattatttaacagagactttcataggttacaaataaatgcactgggctaattaaacataaataaatttttaacttgggtagttatgtgccactaaacttaaaatccaagatctcacatatttgcacgtatttcaccttgagtgattacacaaagtacacacagagaggaggaagacatagagatagtaacacagtgatggaaatgggaactccaaaaggaaatcttagcgtctgccaaaactcacagtggctggcaccccatcgagttgtcgagccccatgattcgacaccaagatcccattcaagccatgtttaacagcctccctggcatcatcacctggagagagtaaaacaagcaccttagggaaactgtaacttaacaggcagcttgggtttagaggcctccacattccagtcaaatggaggctgactcccatctgcatacctgggtcaataatcttagcataaaagtataccctagggttagcgctagaatattagtggtagttttcttggccaaaaacaacaaaaaaatgttactacttacggcaatttaattgtaaaatatacaaaagtatcaatagataatacattgacataaagcgtgtttatctttataagggtatactcttgctaaatattttcaattaataagattataccattttatcatttagcaaaattattcctcaacaatttggatagccaaaaaaaaaaaaaacataaaaatgtcaagcactgtaaatgtaacaggcagtggacaaacctatttcaaaaaacaatctttaataacaagttgtaatagctttagtaactattttaagtaatattgttctataattaaatatatgtttgctcattgaaatgtataaaaaattggccaggtgcagtggctcatgcctgtaatcacagcactttgggaggccaaggcgggcagatcacgaggtcaggagttcaagactagcctgaccaacatggtgaaaccccatctctactaaaaatacaaaaaaacaaaaacaaaaacaaaattaaccaggcctcaggcctattggcaggtgcctgtagtcccagctactcaggaggctgaggcaggagaatcgtttgaacctgggaggcagaagttgcagtgagccaagattgcaccactgcactccagcctgggtgacagagtgaaactccgtctcaaaaaaaaaaaaattaaaattctatgctacatctctaatcatgttttaaaatatattaatttctgaaagttcagtttaaaaatagattactgttctcttaaatctacttgcaacatttaaaaacatattttatattctaaactattatttttagcatgtcctaataacaaaccatttgctaaaagaatcatgaaaacaacactggttctcaggtttaacattcaaaatgcaatactaagcaaaaccaactggttcaagagcgtagcaaaaatcaggccttggaaatttaagcaaatgggtataggtcattggtaatctgtaaaattaagcaatggagataatgggcagacttgactaagaataattttaaaagacaagataattattttataaattatatgctatcattttccaaactttgttttatacaaggctatttttcaactattcttatttttttcaaatgatgatagtgatatttttctcctaaaattataggtataggaaactgttaaacctatatgctatagactaaatatttatatcctctcaaaatttgtattttgaagctctgatccccaatgtgatggcatttggagatggggtctttgggaggtgattaggattagattagatttctaactgcctttcttttcttttcttttttccatttactgtgaaacttcagaatattatccagttcttcaaacttttcaattatttgatctaacctattaggtcaccttattccccacctgaagataacccctggagccctctgccttcctgttccattctgttgtggctactcacaagacataatgtctgccttcagctttgagtttgctcttcttctgtctgagttgaatatcttgtagtctgagtatgccctcatttggtttatattctcatttgtttgtagtagattcctttgttactttcttaaaaaggatccaagggaggtaaacttacagaccacctaaatagcttctcttgtgtgtgaatgacaattggattgggtataataatctaagtggaaaaaccattttcctcagaaccttaaagacatcagtccattgtcttctagtacccattgctgatgcaaggactgacaccagtttgatttgaattattttataagtaaacagttttatgtttattttatctctttatacacattacttttctgaaatttcataaggaacgtgataagttgtgatttgttttctcactctaatgacttacattatcagcattcggaaattgttggtctttaataatttcctccaggcctctttcttttacttttctacctgaaactcctatcagttggatattggacattttaaagttgtcttcatgtacattcatgtaataattttttctttctatttatcttattgttctcattgttgttttaccctttgggaaatgttattgactttactgctcagccattcagtcatttcagcaatcatgtttttaatctttgagagctcttttttatattcgacttccccttttttaaaaaaatcagaagtcatttttctaatcattgggaactcttctttatgctctaattttcttttcatggcagactcttcctatttatatgtatattttcaacttttttgagtatcatttggattttttaaaattctttttcttgttttatctctttttcctgggataagcttttctatagattcatcttgatttgttatgttttggtgtttctgatatgcctagtgatgctaaattttccatttatatttaaggaagaaagattgaggaactgccctgttttgtaaattagtttcattcttgccaagtccttgtctggagtggaaattctttcttggaactccatgtaagaaaatgcaggaaatgtcaactaagaggcaattagactgtgagctcctcaagtgtcagaatcaggacagcatcatgtcatattggaaatgccacccacccatatttcatcccagccattcattaatgtctttagaaaggatcagctactttcttattgagaagtcagtgccaagtgtccactgttgcataagaagtagggtgggagcaggattgctggcaggcataacagcttcctatattgatcttcagtcagtccccttgcgtttcgtcttcactaccctctctgccatccttgcagactatatacctacagcctctcaagcattctattacataatctacccctacctcctctaggatttcctgaaagcctatctcaaggtacagttttctgtatgttttcctgctgtcaacaggctttcaaaagtttcttaaaatttctctgctgtttctgtcctctatcctcctttgctttgctgtcattggtgtatacatatttgcatttctgtactttaatttcagtggagtcttgactttaacaagagaattcatatgtactcagtccatcattttaaaccagaagcccagtacactttcatctcaaacgtatttcataaatggttctctaaagatagggcctcaatggactaccatagaactttctgtgataataaaaatgttctagatctgtgcacttccatcatacagtaccactagtcatgtagccactgaccaactgatatgtggcagtgtgactaagaaactggaattttgcctctatttcattttaattaacttatatagctgtcatattgcacagctcaccttcaatgtttccatgagcttacctgtcctaatagacatagcatggtatttattttaaaaacctaggtgtagtcataaataaccttattaaacagtataaaataatattctgaattggtgtggtttgcctggttatctagttatgtacaggatcctgaacttcaagtcaaatgtaaaaaaaaaaaaacaaaaaaccacttaaacatagacaatggtattttttcaaacctcgtaattgagcatacgtatagctctccagtttatattcctgtgtctgccaccatgtagctacaacctgcattatgagaaattaaatattatcaataaacagatcctgtacaggaggaagaagtgattcactgcttaaggtaagtcatcagtccacccggacttaaatcccacatctgctgctcgcttgctgtgtaagtggcaagtttcttaacttctcggtgcatcattgtcctaagccataaaatgaggatagagatccacatatgattagcttgtggattaaatgagttgaatgtgtgtttagaaagtgcctgatacatgttgaacactcagataaatattaactattattaccattttcctctgatggtgcagggaatataaactaaaaagatgagtaggtggagaaagatttatttgcaggatgcgtttggcaactctatttgggttctgtttataacagttttatcctagtcaagattactatgataaagtgcctcccatttgaattaaatgtttcttaagtaacagtctgttatctgccatcatttcaagtggtttttatattcttcaggtagtattgggaatatagggagaaatgacataatgatttgctcagaggataggattgtgaatttctagagaagcaaagacaataaggataatttataaccagatataagccccttttattagctgcttatgcagcctcgtccacagttttacaatttattttaacacagagagaaaagcaattttgccttaatgaaagggccaaaatattcccacttagcaaaatgttcatgaatcttggatatttttattaattcttagagtttaagagtgtggcattccatatttgtgaatttgccattaagtacattgattgatagacacagtcgtcaatgggcagtggcattgtttgctatcttattaatattttatttccatatttaatttaaaacaaggtataaaagtgaaaaataagtactcaagtactcaaaacgtaagtactcaagatttgagctcaagcccttggagcttttggcctaggaatctgttctgactcagaggagagtagtaactaaatcccggacacatgacagcaattttaaaacacaatccaggaacattaagcgcatatttttttagagtatcttgaacaatgtatacaggcataccttgttttattgcactttgctttatagcaatttgcagctactgagttttttagaaattggaaatcaccaccttgatctgttagcagccatcaacatctaggaaagaccctccaccagcaagaagactacaactcgctgaagactcagataatcattagcattttttagcagcaaggtatttttaattaaggtatgtacaatgctcaagtggcattgtggcaaccccgcatcaagcaagtgtatcagcactatttttctaacagcacgtgctcaattggtatccctgtgtcacagtttggtcattctcactctatttcaaactttttcattgttacatctgttacggtgatctgtgattagtgatctttgatgttactattgtaattgttttggggtgccatgaaccatcgcctttaaaatgaggaacttaataagtgtgtgtattctgactgctccactcactggccattcgcccatctctctccctctcctcaggcctccctattccctgagaagcaacaatattgaaatcagaccaactaataactctacaatggcttctaagcgctcaaggaagagtcacatacctctcactttaaattaaaaaccagaaattattaagcttagtgaggaaggcatgtgaaaggccaagacaggacaaaagctaggctccttgtgccaaacagctaagttgtgaatgcaaacaaaaagttcttaaaggaaattaaagctactactctagtgaacacagaaatgataagagagcaaagcagccttattgctgatagggagaaagtttgagtggtctggatagatgatcaaaccagccaccattctcccttaaaccaaagcctaatctagagcaacaccctaactctcttcaattctataaaggctgagagaggtgaggaagctgcagaaaaaaagtttgaagttagcagaggttgattcctgaggtttaaaggaaggagccatctctataacataaaagtgcaagatgaagcagctgagggctgatggaaaagctgcagcaagttatccaggagatctagctaagaaaattgatggaggtggctacactgaacaacatattttcaatgtagattaaacaggctgtatggcatcttcttccaaacaagccttcctcatactggaagaagatgccatctaggactttcatagctagagaggagaagtctattcatggctgcaaatataaccctaggaattataccaaatctactctgcctgtgctctataaataaaacaacagtccgaatggcagcacatctgtttacaacacggtttactaaatatgttaagcccactgtcgagacctgctgctcagaaaaaaaaagatttctttcaaaatatcactgctcattgacagtgcacctagtgactcaagagctctggtggaagaacacaaaaagattaatgtttttatgcctgttaacacaacctccactccatagcccatggatcaaggagtaattttgactttcaagtcttattagttaagaaatatatttaataacattatagctgctatagttaatgatttctctgatgaataagagcaaaataaattgaaaactttctggaaaggattcaccatctagatgccattaagaacatttgtgatttacaggaggaggtcaaaatatcagcattaacaggaatttggaagatgttgattccaaccctcatggatgactttgaggagttgaagactatggtggagaaagtcactgctgctgtggcagaaacagtaagataaccgaattagatgtggagcctgaagctgtgactaaattgctgcaatcatgagataaaacttaaatgaatgaagagtttcttcttatgatgagcaaagaaagtggtttcttgggatggaatcaactcctggtgaagatgctgtgaacattgctgaaataacaacaaaggatttagaatattacacaaacttcacagataaagcagtggcagtttgagaggactgactccaatgttgaaaaagttgtactgtgggtaaaatgctatcaaatagcttctcatggtacagagaaatctttcctgaaaggaaaagttaatcgatgcatcaaacttcattgtcttattttaagaagttaccacagccaccttaaaccttcagcaaccactaccctgatcagtcagcaaccatcaacacctaggaaagaccctccaccagcaaaaagactacaactcgctgaagactcaggtgatcattagcattttttaggagtaacgtattttttaattaaggtatatacattgttttttaggcataatgctgttgcacaaaatagactacagtatagcaaaaacataactttcatatgcactgggaagacaaaaaaattatgtgacttgctttattgtggtggtccagaactgaatccacaatgtctcttaggtatgcctgtatatgaagagctgactagagaaaagtttctcagaaacacaaagccacagtagaagtgagacagcctaatttaaataaattaaaagaaaaagaaaagaactctaaaaggcaccatgcctttgctgaaaaaagccatttgtttgctagtgtgagttctgacaaagaccaaattctgtcttaagtacatgttaggagcttgcgttgaagttctctaagggcagtttaaccacacacagtaagagattacatcttccattctaatttgcattcattaaaatacaattattaaaatggtgagacagtcagatgtttggtctagatcttcacagttgctcatgatttcatgttcctgaaaatataatctgcacttttctgaaaaaggaaaatgaaagaggatgggtgactctcagtcaatccatgtgatttctgcatgaggacctgtgaaatggagaaaattggatttcccagaactggccctgccactgctcccttccgatccagattgagcatatgtgttacttggtgcaattgttgtcatagagatgattcttgtttgttaaataaaagaaccaaatagttacagaaaagtagacgatgtaaactgtacatgtataaataagttatttccctttaaatgtcaaatgtcccatctctccttatctttttttttttttttgagctttctctaattagatagacttatagttttcatcaagaagttcagtaaataaatatttgggctatctactatgtgtaaaatgtcacaaaaatatttagaaacaaaccagaaatccatatggatgagaagaaaagagaggtggtgatgatggtggtagtggtggtcatggtggtcatggtggtgataggagtggtggaggtggtagtggtgatactggtggtggtggtggaggtggtggtggttgtcttggtaatggtggtgttgatggtggttgtggttatggcgctggtggtggtggtggtcatagtggtgatgggagtggtgatggtggtggtgatgatagcagtggtggtggtggcagtggtggtggttgttcctggtaatggtggtgttgatggaggttgtggctatggtggtagttgtggtggtggtggtggtcatggtggtaatgggagtggtgataatggtgatgggagtggtgatggtgatagcagtggtggtgggtggcagcagtgctggtggttgtcctggtaatggagattgtggtagcggtggtggtggtggtggtggtggtggtggtggtggtggtggtggcagtggtcctagctaaagtgataacagaatgaagatctagaaaccaaaatatttttcaacataacatgtgatagtaaatctaattcaattgatttgcacatatcttaaggaataaagttgtagaaaatgatatacactggaaatcctagattgaaaaggtggttaaaaaataaaatgacctccttctttgttccttatttgaaacaattatggaacaagactaaaattctattcttccttagtgttttaaagccagatcccctgggccgtctctgtgattaactgtcttaattttctaatttaattataccttctcagtcccctccctgccattactctaggtcatctctacaattatctcttttctgggcaacaacatttcctaaatgtcttccctgaccacaattttgccacctccatccattaggtccgttgtgcaaagcatgatttctgtaaaatgcttatatgatgaggttgcttctctgatcaagacacttcagtggttctcagccactttaaagtctaaattctctaaatggcttatgtgttttataaattgttatgcataattgctttattctgccagtacttcagtctgaagtagagtctattggcttgatatcatggcaaaactcaagcatcatctttcattctgaaaagtgttttctaacccactcttacattattgcccatattcttttttaagccatgcccatagatttctatgcaacattttattgcacccaaaatgcttgtttatataactgtctcctacaagaatagactgtcattttatccaaggatctaaaattattttatttcataaaaatattttagcacacagtagttatgatatttatggaatgaatgagtgagtgaataagagaatggatgaatgaataaataaatgaatggcacagaaccttcaggttaatattatttagtccccacagttgaatgcagccacagtaagtagcactagtaatcatggataacaacatggatgcaagtaaaggaagtgaaaccattatttaaaggtgtctgtaaaccaaaccaatacatattcattgaagtataatccacaaaaattttgaactaggacaatgattagtaggaaacagtgaacaatttttgtagaagtacagaataatgtttgagatgacggatatgctaattaccctcatatgattactacacattgtaggtattgaaacatcactatatgctctatgcatatgtacaactattatatatcgatttaaaaaactaatttaatttgtttaagcacagaataagaacatctggatttaaacatatctccactacttaaatgctgcactgggcttaatttcttttacttttataagctcatttcttcacacataaaattaaatagtcaaagtaggtagacctttataaatagggaccacatgactcagacatgttcaagtaaaatctatgaaaaagttttgattcaaagtcatttaatagacatacattaatggacagactctcatcttaaagtcacttactcaaacatttcagttaaaaaaaagtttttggcagttatctatataaccaaaggttatataccacaaaggttttcttgcctttgtgggtaaacacatttacactccaaaattattatagtcattggtatctccctgtgggatctgaatacatggggatgctggaggaaatagttaagtttcttattacccatggcttgataattgagcatttgaccatactagtcagccattctcttcagagaggtgatgtgggtttgaccacactcaaaaactagtcctagccatttgtactggagggagcacaagaaaaagagtaaaagctcttaaaacaagtctgtctgtcataatatctccttggggcttctctttggtctgagagcaactgttgcagctttcaggtaaagcaatgaactcatgacgttctaccaagatcttgccaggcttcatgattcagtaacagctctgaaataaggcaatagcatcccaattctttgaaaaagctcactttgtgcttcatgagagtttagctctgcttcagaatattacctaagaatgaagaaatatttactcactaacatgaaaacagagaattgagagttggaatgtctctctcaatttccatgttaatttttccttgttattttcctttaagaatattatgaacgtatccacaaaggatcacaaagtcagtatgaattcaagtagagaaataaacgaacctctcaaaatgccctttgcaacaattggcaatgatgtcagtcttctcagccatttgatatcttcccagctgatagatgggtctattgctttagccacatatgcagcaagtccactgtcgtctccaaaattttcctcaggagaaaatgataaagtactggtttcaaaatttttcatcctaaaataagaaatgcataaaatgagaaatttgccaaattagaaatacgtttccaatgattcattcaatgaaaaatgttacccttttcaaatcaattggctgttcactgctcatttatctataagtcaattgcacacatattttccatattttgatgtaggactctagactaaatgtgatactctagtggtcttaatcagtgacctaaattttattttacatcttaggctgtgtttacacaaacaaatctgtttcaagaaaaaaaaatgtgttcatattcaaacatctcatttttaagccagtttatggatatagacaatagagttgacacgattttcagccagcaatgcaaattaatcacaatttaaaaagcatttttatggtgcattataatttacaaagggttttgtatgccaaaattatcacaatttttctttaaaagactcttagaaagtaacattgatactctatgattcccatagaaaataaaaacagaggtacaaaatgaattgcctcaaatatagaactagctaatagcagtatttgagctccaaactgggtcccttgacttcattcctaacactattctctttgctcagatctcagtttcctcctggttattgcacctgacctcaggaaaccttccaatgcccttgtagaaaattctagaagaggttggaaccgcagtaacaggtgttaacatgactgtctgttgcccctgtagactccttcttgcctgctattgcagtagtgatggtggtggtgggcatgggagaagtgggaactgtttcccagcagatgagttgtcacctcttgcctttccctcccccttttagttgttctctctgaacttctcggtctgctgactcaaacttctctaatcttccagacaagtttgacaacgacaagagcttttcaattatcaataccttcatttctctgccagtggttttttcttgctcctgggcctgagtcacaatccacacagcagactggaggcattagggatgttgaagtgtaaataccccagctccctcaccgctaggtagactaactctgagataaattctgcctaagttcccagaattttccagcagggttaagcttcagttgccccgactgtagctgtcttggtattatgccctttgttcaatgccttccctcctttgcctcactttcctactcctctagcagtattcccttcaccttccctattaactacttgcactgaaatcataggctcacagcctgcttctaggagaacccaacctgagacaaagtaccactgagttgcttccttcccgtatgactatttttgttgacccagcttagcccagtatttctctaactcacctctaagattctgaagctggcttcccctgtgcctgaggtcttttctcttggcctaatatcctggctagattttggcagttccccactctaggggcaatgtcttttcagcctgcacctctgactcctagctggatggatgacttcaggatacacaatagaatcattcctgtgacttatctgcccacagtcccaaattcagttgcaaacttctcctgaaaggctgtttttgaataatgacagtgactggactcaccttgctcttctgcatactattaattcccctgccagtcaatctccctttttttggtcaaagtatagttgtatgtatattgatctctggcttagtcccatctctttcttcccctccaccagttctgtcattaaatgtagagaagatcatggagccatataaaaatttatatatcggctgggcgcaatggctcatgcctgtaatcccagcactttgggaggccgaggtgggcagatcacctgaggtcaggagttcaagaccagtctggccagcatgatgaaacccagtctctactaaaaattcaaaaaaattagccggacatagtggtgggcacgtgtaatctcagctacttgggaggctgaggcacgagaatcgcttgaacccgggaggcgaggttgcagtgagcaactccagccactgcactccagcctgggtgacagagcaagactctgtctcaaaataaaaaaaaaaaaaaaattatatattatactagaagaatctaggcacactatttaaaaattatttttaacaatcatgacttcctttaatagaaaactatgattttttacactttagagtattttagctaacacagctggttatgtagcttaggtggcatatattgtcataaagatatgaacattcctatcccatataactcaattcaagctattaacaaggctttctcaataaggattgaatagttagtcctatagtttcacggactcagatggccatttaagatcatagaaaatttcattgagtcatatggatgcccatctagtcattgggctttggtggggattttagctgaaatgcctggtctttctttttatttaaatcaaaccacttaggattgtacattatatcatagtccttggtcttctatggtcaccctaatttgaataaagctaaccgctggtcaataaacacatctttaccatggagacctatttcattacatacaaatgattaaatgataataaattccaagcttttaaataatattgttaataagaaaaagtccagtctgtctatcccatagcaagaccgggaaaagaaaaagaaaaacatctgtatgtgtatgtagtctgcatggcaccccacccccatcccaaacaagctccagtgtttcagcaggggtggggtgaaagggtgaaatggataggaaaaaacagaaacgtggataaaattatataaataactgttgttattcttggatggtgaaatgcgaatcaacacttgaatgaatgttgccttacagaaatttcagtgcacaatgaagccttgttgttactctgaaactttgttcaaagccagaagccaagaaaaagttttcagatatcttgacagagacccacgatggagtgttttaccaaaggctccaaaagaaacctccatgaatgctatttttattcggattatgacatatatatatatatatatgtatatatatatatatatatatatatgcttaaagtggcttctgataaccaaagtattccatttcataagaaaaaaaggggtgagatcaaaataataacactattacttagggcttaattctccaaatcctgatctgtttaatgacgcaaaggtgagaaacaagatttcttctttgtaaggtactcattatctcttgagtggcactcaaatatactttttaatatagaagttgttttagctgttagtaatttagcatcataaaaatagtaacaactgctaatgtaagttaaacattattaaataaccaatagtaacactattaatcatgaatattgagtaatacataatattatttattataagtattgataatgcaacattaaagataaagccacataattccgtcttgggaaacaaaaaaataacatgaccagtagaagctacagcatcaacacaatatgaaaagaaagagattgaaagaggggctcataaatacagacactgatacatgggccaccagcctttaattctgtggttcggaaaacacttgtgttgagaacacagccctggtaatttcttcctcaatgtggctgctagaagaaggttcagggaatgaattttgagttcaaatcccggttcagcctcttactagttatgttacattgggaaaatcttgtatgttctagtatattttatcgattgagtcaacaattacttattaagcatctactacatgccagtgttttcaatgtttaagatatataaataaataaaacagttaagaatccctgcccatggtaagcataatcaataaattacaaagtgtagcagaacataagcactatacaaagccaagaaaaaagtagagcagattaagagagatgtgagttttcagagactcaaaatgaaactttaagtatgtatggtaaccagcgttggcaaaattgagaagctaccttgagaaagaaattagtagaactgtgtttgtggttatttgttacaacagcaataaaaataacatgaaggtattatattacagttccaaatgtcagaagtctaaaataagtctcactggactaaactcaagatatcaatagggctgtatttctggagaatctaggggaagccctattcccttgtcttttccagcttctagataccccctgctttccctggttcctgaccacatcattccaacctctacatctgtcatttcatctctttctctgactctgacactcttgcttccctcttataaggacccttttaattatatcaagcctactgataaaaacaggaaaaatcttcccatctcaagccccttaagttaatcacatctgcaaagtcccttttgccacataaagtaacaggttcccgggattcactcatggacacctttatcctgccatacttatcaatgtgaatgatttcttaaccaaaaatttaagaggctattgtgccatttaagaggctactgtgccaagtcctccactgacctctctcccctgcccccaccctgttatcttgctcatatttgcatctctaccatcaatttttattgtggtttcccaatatagacatgtatatccattcctaatgtcaagactcaatggaagtgaggctattagtcatgcgttgattctgcgaatgactgttacagacagagggaacagccagtgcaaaggctccggggttccagcatgcctggcatattgaaagaaccgcagggaagccagagtgcaagagtgggtgaggatgtgagtgctacgcagtgaggcagaggtcatggagacctattcacattgagtctactttaaagcaggccactttaatcatgagagacctgagaagacagtggcaggctgatctgttttagtgtgatatattctggctgctgcgatcaataaatcatttctgggcttaagaaaacatgtcactggcaaatcatagaaaggataagtgtcatgatttaccttgatcttagtcaatgatcagaaattacttttcttctctttaaactgccttggcactgcaccgaagggccaaatcttaattcagggtaaatgaaccatctccatggggatatggagaaagaaaaagttcctgccccaaagcctcaggaatcagtctactgaactggcttcattccttgcttcttccaagagcagatgagaagtctccttactccctctcagtttcaggaacccccttgccattaataatgtatacacatacatgtgttttgcatatggaccaagcagagactaccaaacctctgaactcttgctgggcccagatgccaagagacaggaccctcccccacacttgggcagaggaagtaacaagggctggaaggagccatgctttacaggctcattctcctctggatttcctgcctcccttgcctgccaaacttcacttatgaaaagccaggcttcactttctatgagtcaggtcagttgcagaaagaaaccgatttcatatcaggctataacagatgagcttttggggtgtatttggcctcaggcggaagcctggacctcccgttagcatgctctgcctttaagagctgaatgtgggccactgaggaactgaccagaaggcactggcctactccgaagtccactaggacaaacaacaccaatgtgcactctgaggggctggggtacacccagctgcggggtgtttcccgtgttccctataacctggatgtgttgctcattatttgatcatcttcagaccggagatgtgacaagctaggaagccgcagccagttctatgcacaccgacagctgaaaagagtctttgtttcatggcccgtcacatcatctgggaaggagcccaggagcaaaagaaaaggggggaaagcaaatcaaccttcctgccactcactgagtagccccagcagtgaagaagcaagaggtacctgccagaattaacaactgtgtcatctgcaccccatctaagtagatgcctctgtgaaacatattttggtatccagaacaagaaagtatgtcttaagttaaaaacaaaacaaaaaaccctactgtacttactattgttgttactattgttagtagtagtagtgttaagagatggaggaaaaggaagaacaaattccttttcaaatagccaaggggaaataatgagaaatgtttcctctaagaagcctcgatagtgggaaactatttagaaagtctttaaaaaaaaaaaaaagtagtcaaaatagagaaataatgtaaatacgggattcatattgggggaatttgaatccatcagctttctgacgaatttggcaaggagtaagactatgtcagaggcttttgtttttgttctctttaaacacaggttgtttaggtaaccctgagtctgggatatgtggaacagttttattggccagtttggcagggagagcactttctttttctgtcattggtctaatcctggtgccacatacagaaatgatatcctaaaccagcctggtagtaacagggaggtaacatcacacagctaattcacacatggctcaacagcaagattttatgcacagtagtttattctcacataggcacaaacacagtaaaactatgtgaaacttatacaagactgcagcaactttcgtggtgagattcactccacagtcactgaaatagatatgaaattccaggggaatattaatttgattttggatcttttcattttttaatattttagaagagtaaacacagtatgtttacatgtggcttctttcgtcttttatcttttttcaattttgctagccctagttttttgtttttttttttttttccaaatacaattcaaacatagagtaagcaagggcctctgtggcatgagatctgggaacacaggaagacattcctcatcatcttacatattctgatggatgctgtaggagtccatcataaaaatgtcctccattaaaactaagattttgatcccttttaaaatacttataggcctgaggtacattatacattcatatgaaaaatccaagagcacattttggtggaaactgaaggaaggaaaatctgatggggaaaagaggtgtatagcttaaggaggtttgagtctttcccagagacttccactcagtttccagctttgactcaagatgattgtaatcccaaaatacaaccaggaaagagataataattcacagcttgtggacagggtgaatgaatgacctgatgaaacctttatagttcaacatcagattatgtgatatattgtttttgctaagatgaatgatttgagtgaatgaatcaatgaatcttgacccatggatgaaccacagtgaaaggaatattgctgaaagaagaagtagacagtgagggatcaaagatgtggcttttttaaaccttcattattttctttcttcaatcttcttagccttagctgtcccatgtaccattaaaaataaaaggtaaaggtggctctttgactttaacaaagaaatagggcaccaggatgataataataaactgctgcttgggcaaaattcagtatcttccatctgtatagcaattcatacttcccaaagccaaagcccttaatgcactctggtctgaaaatttattggacttttatagaggccatttctgtttctattgtgtatctcaaaaaaagtgatgtctacaaaagggatgtgattagctgaagattaactagatgtttagcaacgttgctatcagtagaacccagaccctaacattcccagtcaagatccctttcgcctcagctcggggcccacatgatcatggttacctgagttgtggcggcagtttgaatctgttacgcacatcatccagacggttgcccaggtaaggtgtgtccactgtcacaaatatggccttgtagcccatcttctctgcctgccgcactagcttcttggtgacttctcggtccttgtagatatacagttgcagccaacgaagtgcctcaggaccagcttccgccacttcttcaattgaggaggtggcccaggaactcaacatcatgcccgttcccagggactgacaggctgagaaagaaaggggatgatcaagatgggcctggcattgcttaccctcccaaacctttgaattgtagttggatgagtaaagacatctagaagggcaatttggcaatatgaagtcaaatctcttaaagagagaagaaagtctggcccataccatctatttcctgattctacctcctctgatacaaatggctactggagttatttctgctcagtgtttattttccaatgattagaaatatacatttctttccacactttgtatattgttcctgaagaacaaaataaatccaatagtcaaaggtgtctgtaaatacgggcaaaaaatattaagaacctgaacatccagccttaggggattggttaaattgtaggtcatatataaaatgaaatgaacacacccattaaaattaatattattgctgggcacagtggctcacgcctgtaatcccagcactttgggaggctgaggcgggtggatcacctgaggtcaggagttcgagaccagcctgaccaacgtggtgaaaccccatctctactaaaaaaacacaaaattaaccgggcgtggtcatgggcgcctgtagtcccagctactcaggaggctgaggcaggagaatcgcttgaacctaggaggaagaggttgaagtgagctgagattgcagcattgcgctctagcctgggtgacaagagtgaaactacatctcaaaaaaaaataatattattatgataatcaattttctgcatcaatatgctaaaccatggtgcccagatatttggtgaaacatgtctgaatgctgctatgaaggtgttttttagatgagattaacattttaattagtagactacaggtaaagcagattatccctcataatgtgagtgggtcttatctaatcagctcaaggccttaaaaataagtctgtgaaggagaataagaagaaggggaaggagaagaagaagggaaaggggaaggagaaggggaagaggaaggggaagtaagactgctaagaaaaagaagaattctgcaaggagcctgccttcagactggaactgcaacatcaacatttccctggtagcttgcccacctactctgcacatttgaacttgcaagcttccacaaacacatgagccaattcctaaaaatgtctatctatggataggtgttttagagataaagatagagatagagagatagacttatgtatgtatctatctgtatctatcgagagagaaaaagatgagaaatctccaagggggagatcctattaattctgtttctctggagaactctgggtattacaattttaaaataatatagacatagaaaaatgtttatgatatatagatatattaaggaaagaaaaaagtttacaaaatgacatgtattacatgatatcaaatttgtacaattctacttattggtagatgaatctaaacaaactacatgctaatgatgggtgggagaattatggggttagtttaatttttttcttcctttttaattttaaaattttgtctttcaaaattgtattaaatatatagtttaccatttatgttgtcttttaaaatctcataaaatgtgtgtgctagatatcccaagtagacacatccttttgagcaaggtagcagttacattttggggggaaaggtagcaagaaacgggcaaataaatggaaaattaaatagagtcatctaactaatagttttagagggtacttgagagaacatgagtgataggtaggctttcttccaaaaattggtagtaaaattggagtaaaattggagtcagccttagtggaggagaaactgatataatgtttatatgcaatatataaaacagtcaaatctgttataaagtataaatatattagaagtataaatatataaaagtatattatgtaaaactctattccttcaagtcatttgactcatctgtgtgcctaccatgcatcaaatgggtataaatatacttgtccaaatgacactcacaggatgttgataggaatccagtgagttgctgcttataaagctataatgagaggttaaaaagcttccatgattctcaaactttagcaggacaatcccctggagggcatgtgaatgaaacacagatttctgggtcccacccacagagcttctggtccagtaagtctgagatgtggcccaagagtttgcatttctaaccagattaggctgatgctagatcacactttgacatttaaatagtaccatagccattagatagtaaaggtctaagttcaaatgaaataaaatgtattttgtttttgataaatgttaatttttcaatgcctttgaagatgtttttcatacatgttctcccggtcagtggttagctacagaagatctgagttggaggtcatcatgtctatagatcactagtctgttctcccaaagagttccttctataggaattcatgactggcaaaatattgtctaaaacccacattttattaagtaagaacacaaatgaacatatagaccattgtctgattttcattaagatttggaaatgtggaaaataaattcaggtcacttactgctgtttgaaaggaacaccaagggacattgattgcttggatcaaaatcctccaacaatcaattcacctgaaataaattatgtcctggccagggttggtggctctcatctgtaatcccagcactttgggaggccaaggtaggcagatcccttgaggtcaggagttcaagaccagcctgatcaacatgataaaaccctatctctactgaaaatacaaatattagctgggcgtagtggcgcatgcctgtaatcccagctactcaggcgactgaagcactaggattgcttgaacccaggaggcggagattgcagtgagctgagatcacaccactgtactccagcctggatgacagaatgagactccctgtcaaaaaaaaaaaaaaaaaaaaagtcctgaagaggatgttacctaaggtcacacagaaatgagcaacaaagtaggagaactcagcatggctgagcactctcccagggcaatgatctttctagactccctacatgtctaaatgactccctggtaccatgcctagataaatgtactccctcaatatttcagggcagtgacatccaagagagtaggtttgccatgtgcatgagagacactgccatgcattgggaaggcatggaatcttagaatccagtgggaaggtcctccgtacactggaggtgcagagtgtggatgcacaaaggggtctggcagagaaaatcactcagatgatagggcatgtttttgtagttaatacaaagacatcatgtagtcaagcagcagctctgccaataggaacatcaaaatccacaaaaggattcccttgaactcatgagaaatatctacagacactccacacagattaccaaaatgctgcaaaacacacataatttctacttctcttaaaccatctgacttgcaggaaatgtaagcccttcacaaacattttacccaaatcacttgggtatgcatatttagagagaagcaagtttggtccataccatctatttcttgattctaccttgatacaagtaactgctggagttattgctgctcagtgattattttccaataagtaaatcatacatggctgaaattttgaattggcatccccaaaattattccaagagaatgctcctgcatgtaggaggaatatcagagtctgtgctaaggtattatcatttgaagctaaaatactagtcctaggagaaaacaggagcaaaacagcaggctcccttctccccagaacaaatatgagtgatcactctgatctcaatccacttgtgactatttgctatgacaaaggaaaattattgatgaattacattcattatttttaatacagttttatgttagaatgagctaagggagcctgggaatttatatgaaccattcagagaggcaataaagaatttgcctatttcttaaggacagatctgagatgaagttggtacataccagaatggcaattatgtttgttaaaatattaaaatacttacactccaattggtaaatagccacggctctgaagtttatcaccccagcccccgagtctcttcaatatgtcgttgtgcttcaatatgtcatcacttccttttctccccaaggaatccccagacttcctcataatccagcaacttaaacatcagtgccggcagagcggggggcatccaccctgttagagcgctagagaccagcagctgagtatctcttccaattgctcaaagtcctttgctaaataattcaaatattacctttgcctgagagacaatgataaaccctttgagttcacactgctcattttggggtaatacttacaagcttcaaaattttataaatggcgtagcatggtcagacttcatcaaaaagttctgactatcgttatcctagcctatggcttgaaagcacaaatgttttaagcccttttactcaccttatccattgtccacaatgaaattctgactccctgctcccaaagcagacactgtctcattgcattttgcaaaggacaggggttggatttcattcttgctcccaatgtgtggctatgtattagactgtaacggaagattccaatgatatgtgttgcagttttaagatgcctggcaaaatggagctcacagctgaggtcatattaacataaaggcaaaacctggctcttgcctagaatgaagttccctaatgttgatccaaatctaaaaatcttggcttttgtaatagacggtatatcctaaagatgaaatacctaggagcctacaccatcaagtaacactgatcttgtatgaaatcccaggactctcttctcttactcactgactctttcattgtccttaagacatatcttcaaagatagacacctacacttttaatgttacagatatattcagactttattcgtatgtttggcatttctttctcttctttaattaaacagtgatacactgtgccattgctataaggaaattgcatatgacacacacacacacacatacaatcactaaaagggacactggccaggtctcaggtattgaagcatcaaagataaggctacctatataaactgggagataaaactttcatttcagaacaacaacagggtagaatggattgaaagcctgtcctagagtcccagtcttgccatccatgaagtacgttctatctgcacaattgctatagccacagctgttctgcctacttcatagcattgcaagatcatctactggggcaatgtttctgaacgttttctgtgtaatctctgaagccatgcaattgtaaagggtaaggtgagaggacgcctaatgcatttggaaaaataagttctggatagctttgtatgtatttctaattttgccaaggacctgaatttcttaatgtcattatttgttaatcttctccacagccagctttcctttgcaattatttttaatttatttatatttatttttaattggaaaatagtaattgcacatgtttatggggtacaaagtgatgttttgatctatgtatacattgcagacaaatttagacaagctaatgaccatattcatcacctcaccaactgataaggtttggctttgtgtccccacccaaatcttatctcaaattttaatcccacgcatcaaggcagggaactgtaatccccatgtgttgagggaaagaggtgattggatcataggggtgatttcctccatgctgttttcatgctagtgagtgagctcacacgagatctgatggttttataagggactcttcccccttcacttcacacacaggatctcttacctgccaccatgtaagacatacctgctttccctttcaccatgattgtaagcttcctgaggcctccccagccatacagaactgtgagccagtaaacctcttttctttataaattacttagtctcgggcagttccttatagcagtgtgaaagtggactaatacaccaacttaccatttttttgtagggagaacattaaatacctaatcgtttagtaattttaagatatacaatacattactattaactgtggacaccatgcagtacaatagatcactaaaacctattactccagtcgcactgaaactttgtacaactttgatcaatatgtcactttcctcattcttttccttcctctcccagcctctggtagccacctttttatgatctgtttctgtgagacctacctttttagattccacatataagtaagatcatatagtatctgtctatccatgttgttacagaatttcccactttttaaaggctgaatagtattcctttgtgtacatacacctcattctttatccattcatctgtcaatggatacttaggttgatggcatatcatgactattatgaataatgctataacgaacatagaagtgcagatatctcttcaacatgctgatttcaattcctctcaataaatatccagaagtagaatttctggatcatatggcaattctatttttagttttttaaggaattgtgtgaaactaaaatgtttctgcacagcaaagaaaacaattaacagaatcaagagacaacacaggtattgggagaaaatatttgtaaagtgtatatctaatgagtgctaatatccaaaaaaaaaaataaggaactcaaacaactcaatagccagaaaacaaataacccaattaaaaaataggcaaaggacagcaagagaaacaatcaaaggagtaaacaggcaacctacaaaattggagaaaatatttgcatactatgcatccaacaaaggtctaatatccagaatctttaagaaacttaaacaaatcaacatgacaaaacagataaccccattaaaaagtgggcaaaggacatttgcagatacttctcaaacaaaggcataaaagaggctgataaatatatgaaaatgatgctcatcatctctaatcatcaaagaaatgcaaatcaaaaccacaatgatataccatctcataccagtcagaattacttttgttaaaaagtcaaaaaatactatgttggtgagtctgtggagaaaagagaaggctgatacactgctgtagggaatgtaaattaaataagccactatagagagcagtttggagatttctcaaagacctgagagtttttctaccattcgatccagcaatcccactaactgggtatattcccaaaggacaataagtcattctaccaaagagacacgtgcacctgcatgttcatcacagcactattcacaatagcaaagacatggaatcaatccaggtgcccaccaatggtggattgaatttttaaaatgtggtacatatccaccatggaatactatgtagccataaaaaataacaaaataatgtcctttgcaccaacatggatgcagctggaaatcaataacctaagtgaattaatgtagtaaccaaaaaccaaataccacatgttgtcacttataaatggaagctgaatattggatacacatggtcaaaaaaatggtaacaatagatgctggggaatacaacagtggggttgggagggggaaaagggctgaaaaaaactacctgtttggaattgtggtcactacctaggtgatggattcatttgcactccaaacctcagcatcatgcaatatacctttgtaacaaacctgcacatggctccctgattctaaaataaaagttgaaaaaagaaaaaaaattggcaaaggatctgaacagacatttctcaaaagaagagatataaatggccaatagatatatgaaagaagctcagtatcactaattatcagggaaatttaaattaaaatcataatgaagtatcacctccaactgttagaatggttattatcaaaaacaccaatgataacaagtgttggtgaagatgcaaagaaaagggaacccttgtggagaaaagggaacccattgatgtcaggaatgtaagttagtacagacattttgaaaaacagtttggagattcttctacaatgattttgatgctcaagagacccattcctcttttcccttgcaaatatagtgtccaatgctcaatacctttatggagaaagctcctaaaggagagtggaatcttctccaattccaagaattccctgtgaggacatatatagggagagaatatctaaggagataatttctgcattcccaaggtacacattactttggagagcctggaacaaataatccaagaagtgaaacaagaacatgcttttccctatccccaccctaacctgttcacaaatttccatggggggagctgcagagtgagtctaaggggctggcagcacttgcatagtccaaacatcaatcagtaatacttggaagaaaaattgtaaagttcccagtgtaagtttttggtttctctactcttccatttgcaatgtaactataaatataatgatataaaaataaatgagattaatatccttgtttactatcatccattccccccactccatctcaaaaaatgggctacggccagtggcatgatttctgttttatagaataaaagttaatctcagacccacccataataaagatttctattagagttaaatcacatgtcctagggtggaaaaatgccacaagggtctgcaataacctgacataaggtaagtgtagctcgacctttctaaactgccattcaatagagggttggctaaatttcctatactatggaacctacaatcaatggctgagatttaaaagaactcatcaagtatgaatgcagctacctctggggacgctaatccggaactccaaagtacagtgatttaaatgagctaggacaggtaaacagctttggaaaacagcaaaaactggcagtgttctccctctggctgggaaatgcaattgttcttctagagcttggcagagttttgttttgtttgtttgtcacatcaagtcttaatgaaaacatttatttctgatccaggtaatctggatgtgaagaagcaaaaataggaaatccattgtgtacataaattttaggggcctgcatactaagcctgcctgtcccaggtttttatcaaagactactgtgaacacatctcttaattatctagagtctccttgtgacttctcactcatttcaggcagtcattctgaacttaataggctctcagaagaccttgagggtcttcagaagggaacaatatccatctacatctaatagtgtcatgtgtgaagacctgaactatgcctttggcttggaaccaacaggaactttcatcccaggctctgatcagggcttctcaatctttgaggaatcacatgggtatgttaacaaaattcagattctgactcagtaggtctgtagtgcgacctaagatctgcatttctaacaagctccagagtcctgctgacgctgatgttccaaggaccatactttgagaaccatgaggtagatattttctttcaaaaggactcatccaaattagtagaatatgtgtgatgtcctgagcaaagttggggctcattgaaaacgggagggaaatatggagcaatggcagtgaagttggtagtggttgtcccatggtttgccaatggcccgccatgccttgctgataaatctgcctttcttctagcctggcaccctctggagagggtcacaggtacatttgccacatttgtttatgtattcttctcttattagttttaaagccaaggaattaaactgtgttcgcataatggcccctcagtacacttaaccattatcccatgattttggtttggtttagtttgggttgtgttgttgttgttgttgttgttgttgttgttgtttgtttgtttagcttgcttatctgggatttgtccagcttcctagatctcagatcagaagcagaagtgaataataaataaaaataaaatggtataagatgaagaagagagcgcttactcaaagctgagaaagcacaagttatcaattataaaatagtttccaaatgtttaatgtcaaatccaacaatcttacacacagaaataagatgatgaaccatcaggcaaaactgaagtttatcatgctgggcttgatgaggaagggaattataatatatttgagaatgatgttcatccacagccaccaccaccaccacaaaacaatagagggaaatagaaaatattagttatcaatgagagtaaattatttggaacatcaattcatatgggactaatcatatacctagattcaagcagaacaattaagtaacatgttaatttagacccaaataatttctttgaaaataattctcttttatgggaaggcagaatcaaatttccaaattatggttttaaggaaaaagaggaaagaggaagcaaaaaagtgtaatatgttcaaagggcctaaagtgttggggttttcttaggtgcatttgattaaaaagctcctacaaaacttagtcatcaaaacagctgcactgaaaataattttgttgagaaaacgcattttgtcatctgcacaggaagtcattacgtaatggggaaaatatgcgatgaccaagtaccaagcagttgtgtggttctaaactcagggcctgtcatagtgaagtgtttgtataactgtgcaccataatgtccattgagtgtgtcatcctatcttcacaggggaactaccatcataaaggtcttcacagaggatctaccatcacatagacgcagtcaacattgttttatgaatgtctaaaattacaattgagattaaccagaaaaataaagttctgaagtcagtgatctaaaagaacaaaccttcaactacaattatgcttgaaatacttaaaagttgtcaaacagatcttaatttacaatttatggaactgaaccaatttaaacactgccaagaaagaccaagaaaccagatttaatcgttgccgtgctttcatcatggcccattgaacgaatccggagctatataatcttgagtgatcacactgccactacacctctagacctcttttttacttatgaaaatattttcaaggaacaattagtctcagggacatcttagctctcccttccttgttttcactgtatttctagggcagaactctgcaacagactaaaacattagctctactgcagtgattcctgtgttattattctgtcattttactgaattgtcaagtcctggcataaatggcagatcatatggagaccataacacagtgataggcctttaaataatggttttaaggagtattgagtttgcacacaacaacttcaaccaacctcccagtgtttaacaacttcagtgttgggatacacatgtgagcctctgacttttttcactgtcacattttaatgtcatcaggcacattaataattctgagaagaagcaatctcatgctctcaagaaagccacccaatagcttaaattttggtgcaaaatcgtagaaatcactccattcgatgactgtctttaatatggctagattctaattttttaataggtgttttaatcaacaatcttgtttcattgcaaagtgattttaacactgaagccactatttatatgaaaatactttagcaatgaattatacattttagtatatgtatatatatcaaatgtccataatcttttaatacatatataagcatatgtaatacggatgtgtgtttgtgtgtgtgtgtgtgagtgcttacacacagaaagagcatgtcactgactttttattgttagaaaagcaagtctaaaacataaaatttggttacactttagagtgaaacagacttaggttcaaaccccatcaccaccattactggcactagaccttggtcaagggcttccttcttctctactgtcaaacagaatgagaattacttcacaggcctattgtaaggattaatcacaagaacgtaaagtccaagcattgcacctgatacatgacaggcactccacttcagaaagagtaaaaatgttccttaaagcaagtccagtgctttgcctggattaggtaaaattgagaataatggggatattttcctagtaggtatgctgaaacatatatctagtcggtcgcctagcacaacacataaatatataaatcaataaagctttcaaaaaatacatcgtttgggtttagagcaaaggaaatgacaattcttcctgttgaatggtctttcactcattgttaaggttgatcacttaatcttggaaaatccagaaaattcaacagctaaaactctcacctacaccctaatgcagtcatctggggtctgtgtggctctttgtgttactctgcaatctgttccacctgcatcttaataggtggtcaagtcatagctgagtcccaaaacttcactttggaatgttctggccttttaggctcaaaaagaaagtgtttagatttaatggttttatggcccatcaaatccagtgtggtagcctctaattgcatccaggggctggaatttcttttaaaactttttttttttttgacagtttaataagaatttgctaatatgctgaacattcctggaacgcattaggtaggttttaatttttcttgatatgaggtcccagcactccctcatgtggcacttgcccacataacaagtcagaagcaaaaggataaatgaatatttaatccttcttttctctttctttttgatttctcatgtttaaagggagaaaaaaaatctcaagtagctccatgaaagatgaaggaaaattttattatagctactgtgcataaaacctgagaggtttccatggcaatgttcttaaagcaccaaatggtatagtaagcattttattaattggatatttgagaagtcagagatgttctacttatcctggaagactaaaatttagcctaatgataccacctattttatatgtgttagcatttatgtttattattgctatttccttccatatgttaaatattcatagaaataattttgtatccttctttaaagaatataaagaaaaaaattcaaaaaaataaataaaaatgatctgctagagtttcaaacggatgtgccattataagtagaggcacttataaaacagcttaaatattataagatttacaactattaaaatgttgattaagtaatccattgaatcaaattttttattcgtaacacagtgcatgaaaaactgccctccattcagtatttttcagttatttttttccactttaaaagacttcttagaattttatcttttgtttgattgtaattcatgacccattgtttatgctcccaaattttgcaaaaagcgaatgatttcccaattaatttcacttctgtggcttattttatcttctcaaagttaaaaagataaaacaataaaacataggatgtttgcaataaatattttaagatgatagcatagtgcttgccttaggattcttgctacagttaatgacgtttggaaataccagtaacagagcaggatattataggtagcactgcctaagtgattaataatctgagcaaagcattaacctctctaagcctcgatttccacacccacaggagttggagaaagtttctcagggttttgcactcacatattttaagatggtggtaaagatagatgaataaataataaagtcaaattgcgtggcacatactaattgctgtataaatgctggtgatcatcatttttcacaagactttgaagtatcactttctgagtttatgcaacatttattaaagacgtttgtgtttttagcaatagtcagagatagttacatatcttgttcctctcctatagaccaagaatgtactttgaaaaatggaaattaaaagcattcaaatgctcactgcctcatctaaaccctccaaggctgacatagtgcagtcgaaagaagtgggctgacataaagtgcgtctaaaccctccagggctgacataaagtgtagatttcagtagagtaagaaaaggtagctctatactttgaattgtttctttttgcatttgataaaattttaaatgggatcaaaatcatttatttatatactgaaaaaaattgcaaagatcatccacttctatgccagttttctgggtttttgtttttggagatttttgttgtgaaagttttttcttttttttttttttgtctttccagcagaactatttaaagaacttttcttttgaacaccaaaatgcaacacaagtagctcatgctcagtatcacacctaagttctgtaagatccctggaaacaaccccagcctccttgggacgtggcattcaatccactggtcttgctcaagtagctcactttatcaatgaagaaacataatcctagaaagtgaaaatgacctgccacagaaataaaactagttctcggtaaatttccacataaatcagatgtcccagatgtacagcctaggggacacttgtagcccacaaaagtatttactttggcccacacattgttgccccaaacagtgttttagggaattttgatttatttgcccacatttaaaaaccaggagattgtacatagaaatcaagatttctggcttcttaaaattttggaagatttggcaaccccacatccctgctcccttgggtcatcaagagctaagatgtggctgcccccttctgatggaacatgcaatctcagactcactgcagtctccacacaggagcttgcactgttttttgtttgtttgtttgtttgtttgtttgtttgtttgtttcaatttcatcttttttggacatttacattacaagcctggctcctaaaagtacctttttttccctgaggtttctgcataaagcttaaaataaaaatatttttcacaaagaaaaagaacaatttttatttccactagatgtaaatggaatatacttttctgaaagtgagtttttgtgtgtgaaagataaagatttcagagactttgggctctgaggggcaaataaagatagtgtgtaagcatttctagcatttatttcatgaatcctcacaagaaatcctcaggtgagagctcttattcatccagggttgccagattgagcaaacatacaggacacctatgatttgttgtttatctgaaattcaaacataatgggccctctgtgttttatttgataaccttgtattcatcatcattttgaaaatgaaaaaagtatagcttcattggtcactctacaaacatgcagcagtgtaaaaaagtagagttcagacagggcgcggtggctcacgcatgtaatcccagcactttgggaggccaaggcaggcagatcatgaggtcaggagatcaagaccatcctggccaacatggtgaaaccctgtctatactaaaatacaaaaaattagccagccgtcgcggtgcgtgcctatagtcctagctacccaggaggctgaggcaggggaatcgcttgaacctgggaggcagaggttgcagtgagctgagatagtgccactgcactccagtctggtgacagagcaagactctgtctcaaaaaaataagagtcgagctcagttctcggtcccagttaataaggtggattattattattccacagttgtgagaggaagggcagaaaggcccttgaagttggactctgaataaatctggagagtcaacggggaaaatgagactatggcaccatagcaattcccagaactttctggaggcccattctaattactcaggccagaccattgcctgtgggcaccaatgggtttcacttactctcactgaccctgctgagggggacacttctccagggagattgataactaacccgttttctgaacctggccccaacttctcttccttgctagggtctaagtccctggagacaggaatgcttagcggccagatatttaggagggtaacaaaaaaaaaaatactccacaacaaattgcatagatttcccaatattcccaaggactggcttgcttgagaggatttccatattctttctgggaatgatggaataaatacaataataacttcataattccatgtgaattttctgagtttttataaataaatctctgccaagtatgaatattcttacactgttacttaaatttgcctgtggctatctatagccttcagttagctattatcctggtttgcatacttcaagaagccaaaaatgacacagagatgtgagagcaagtcatcttatttggaaacaatctcaatgaattgaaggaatggggaagtgagaaaagaatgggaaggaagccaataaaagagggtgtgttcatgggcaggcaacctcagggggcaactgggactcaatccttccaaggaacactgggtgaccatattagaaaatgcttcagttacctgagcaaagagagctgaggtatttatccacctactgctgtacatcattagctagggaaccctctctcccattcccctacttcaaacacacctatccatgggctcatgttgcaacagataatgtcaggcaaaaagtggtaggtctgatggaaatgggaagtaagaagggaatacatgcagagcacaagcaccatctactccagccattcatcctttccttgcaagtaacccactgtcccacaacataaacacaccagccaaagaacacctgctatgagctgatgaccatcagctttctggatacacctaaatattaaatagactaataacctatagatagtctttaaaacataggtgaaaacttagaaaccctggagagaggtttctagtataaatacagaatagaaactctgatgttgctgccctgataggaacccaatggaggaccctatgtttttgagggcaacatgtgtacacttccattgccttctccaattcctctgcaatctcgatgtcaccaccctctctttgttctgctggatccaccttatccaaatgtctattgtgtaacttatcttcctgaggggtctgctttgcatgctcctaaaactataattacttctaggggatcataatgggcttctcctcatgacacttcataggagtttctgaaattaaagctcttgcaaagtggtgaggagcccagattctggagacagaatacctctgtctgaatcccatctctatcacttatgaattgtgcatccctaggcaaggttattcacctggcgtgtacctcagtttctcctgtgtaaaataggtttaataatatgatcgatttatttgggccgctctgagccttcaatgctataatactcgtaatatacttaaaatagtgtctggaacatgataattgctttataagtgttaaataaatctaaggggataagactgtaataggcatttaatatcttcttatggttacttctggaggaaatagtcctacttacactgtcaaatcatagtttctaaggaagctttcttttcttctttcttctcctctttcttctcagcccaactccaccaagaataaagactggtcttggaaccatcaaatgtgacttggagaataagtctgtcattgacgagctatgaaaaactgttttctctggaactttagctacttgcccacaaaacagggacagaaacacctgtcaaatatcaaataaagcaatatgtgttggtatggttaggctttgtttctccatccaaatctcatcttgaattataatcccaggtgttgagggaaagacctagtgggaggtgattggatcatgggggtggtttcccccatgctgttctcatgatagtgggtgagttctcatgagatcagatggttttataagtatctggcatttccctgcttgcacttctctctcctgccaccatgggaagaaggtcgttccttcccctttgccttccaccatgattgtaagtttcctgaggcctccccagccatgtagaactgtgagtcagttaaacctctttccttaataaattacccagtctcgaagagtatctttaaatcagtgtgagaaggaactaatacatgtggtaaaaataatttgctggctccagggtgccttaccaagtgagctctgctttttgctttctctgcttcctttctttatttccattctcttcatggtcccttgtccctttatctctactcttttaaatctaattgttatcatttcctccttacaaaataattcaaagaagagtttataaggttgagccaaaaatcagaagagtataaagtcaggagtaatctcatcacttataaataaacatttgtaaattgtgatctttgaaactaaatgtattttaggacctgactattgtttgcaactgatttctcacaattttaaattaaaatatcattctacattattgcactcttcctatagtataatttttaaatttgatgtcatttttatgcatcatattttttgcaaactatctccaattataagatgtttgggtatttttttcaaattattttcctgctaaaaataagaagcatgaaaatccttgcagaaatgatttttttcctcaaaaatcataattatttccttggaattcctagaagagaatttttaacatcacatggaatttacatttttagagctttgatatacagtgccagattattttctaggaagattattccactttatacttttctcaacactgtttgaaatgcacattttctccctaacctaatcatactgcctgatcttaaaataaaaattcgatatacggaaaataaaatagatggtcataatttccatgtctttgcttattaatgaaattgaatatttttcatatgtttattggtcacttttatgtctccatttgtaaatttcctatttatatcttttgttcacttatttctctttttccctttgagcaatatattattttcttcttcaaatataagggctttttacgtggaaaggacattaacccttcacagtctcatattttttttccatttctttcagtttaccatttactttttattttcattgagatttaagagcactaaagttttagttttttgatgttcatttgttttcttttgttctaaggttgttgcctatagtttcaagcctgaaagggcctttattatcttgattttgtatagatatttacccatttagtatttccctttttttttcttctctctacttatgtttcaggattaccatagacaaaaggctgaggccccaaagccacttatttgtatgtggtcctagaattaaggaagctgctaagtctgtccagcaaaacctcattgtgccattctgatatccctgacagaattttatgtcagacatttcaagaagggaagtgaattcacaagatccttaattcttaaaactaaaatgttttaaaatattatatagtcgtgttctttttctgctctgcttagcatcaaaataattcatttccaacttttatattagtttctggagcacaatttggggagattttttactctgcacagcctttcaaatgttcacagttgctagagaactggaaagttaataaattagccctaataagagatttctttacatcatatttgattttctcatcactccctcctaagacagctggaactgctctattgggaatataactcatccataaaaaagaatcatgacccaaaaccacggaagaaaacacaaccaaccacgttgctccatttgcaatttggctgtgagaaccactttggtttgggggaagcaggagggttttgagataaggtagccacagggctgaattccaattctgtaactacctagctgtgactttgggcaagtctacctgtcagagatccatttcctgagacagtactattaatacccataatataaccaacagttactgagcccctactctctgccatgaactttgtatacctgaactcattcaattctcaccataacccaatgaggcaggtacaatttttgtccctattttacagccaaggaaaccaatgcagagagaggatatcttgcccagtcacacagctggaaagaagaggagcaggacatgcaagaacaagtattttgatgatagagtccatgagcttaatgtttctgagtgtaaaaacatcaaggaacatatttgcttggtgcattcagagaaggaggtcgataaacgttagcctccttctgtccctgtggtgacaatcttcctcctacctctcacagtggcaagctcgccgtccacatgagccatgcgctgcatggccgtagcccccacacatattggcatgctgaccctctgtcctaaaacagaagtcgacagatctgtttcagcaacattccggagcatccttggatacagcttccatctagaattaaaaaataaaataaaataaaaggctttagagtttcagaatcataaccaaaactttgacattacattttagttaaaagaaaaaatataattggattttttccaaacaagcaaatgacttcataaagctaatggaaaagaggcaattttactgtttgtttggttagaaagttaacaattagaggataatgaatttcccaagcaattatttattaaagtataactaatacataatagtattcactcattttagtctgcagttttgtgaattttgacaaatgcatacagtggtgtaactgccatgacaatcaagatctagaaaaagttcaatcattcccaaaaaagtccccattttcttttgcagagaaactctccccagttcaatcccctgacaaccactgatgcattttttctttgtcctgataattttgctttgcaagaatatcatgtaaacaaaatcattcagtatgtagccttttgagtttggcttctttcacttaacataacgcattagagattttctcatgttgttgtacgtgtcaatagtttgttccttttggttgatgaataatattccatcatacaggggtactatcatttgtccagtcattcccaagctaaaagacattttgaatacttacagtttggggggaaattctaaataaagccactacaaacattcacgtacaggttcttgtgtgaacatagttttcgtttcacttccccaatcttgaaaatcaagatggtatacaaatgcatagagtttagattagagtttaagaagatatgctatgtctagtttgtcttctttttatgtgataaacagcagcttcaggcaattacttttaaaattataatttggtttcttcaaaattatttagttatatgccatattcattaaagtctaatgatgagggaaggttttttattagtttaatttaacacttttctcaaaaatgttatttgacaaaaactgaaatttgggtgttaaaaagtttttgactccggaaaattattttaaatgaatgtttctgtgattcttctgtgttggaatgaaaattaccaataaaccagcaaccaaaaattcaccagtaaaatttacagaagaactagttctctttcctcctggcaaaatatatctctcctatttgttttgatttattattctcattagtactgattaaaattgaagaaaatacagccctatttctagtatgcatgagtataataaacgtgttgtttaggcacacatgcatatctaaccagcattcacctagtatttcctagatgtaactctacttccagaaacagcatgactttttagtaaatatagtgaagtatgatatagtaatgcagtaacttaaagaaaaaaaaagaagaaaaagaaaaagcccttaatcgaagcgtgcttcctgtagcggaagaagaaattctgccttctattgctttgtggaatagctaagggtctgtaatctaacccttcctcacataataaagtaaaaacatccagtccctgaaaagcataataaagaagttttactgtgtgatttctatgctattcctttgaacattataattgtcattattttatgccacaccacatgctctgttgctgaaagtcttttcttcttgacggaccctcacagcatgattctttgatctccattttgaagggggagaagcagaagccttgaagagagtttttattaccaatcatctctaagtgtgttattagaatgagagaaaacgatcttaatagcagccattggcatgccagccttggaaggcattaatatttacttagagctagagaaacaatgaaagctttatgacaagaacaagcaaatctgcagggcagcagccgtgtgtgtgtgtgtgtgtgtgtgtgtgtgtgtgtgtgtgtgtgttcgcgcgcgcgcgcgcgcgtgcgtgccaaaagggacatttttaaaggtcaaattcccatttataaagcaaagctgaatccttccatctccagacagtggctttacacttgtccacttggtggcgcagtcactttagtaactgcgggctcttaatttcccttaaacagtattttctgttctgaggataatacagaggcttgtcaaccaatgcacaaaacgtaattgctacgtaaaattagataaaatcaatggaatgggaacaggcatgttatctaaagagtcctccatgttttgatatttttcaaatagtagtaacaactatgtcagatagctcactagctttccaagccttgcccaaccccactccaaatttaagtaaatttcccacaatcatacataaaatagcacctcactatattctcggactgtgctttcctgggcctccactttggaaaaagaattggttcaactggcaaacagttgaaccaattgaataataaaccgttttcaaaggatagaaaatgagatgccagagtaaaggaagcggggtaacggggagaatctgttcacaggaattttggcccaccctcacatctaacaggggcctcaaatttaacttataaaaaaatcaaatgatatatacactcctcacaaagtagctgccctgttgaaggaagacacccatgcctcacccagctttataactgcatgctgtttctgaatcacactaactggacatagtggattcatgttttgtaagttgtgtaatcctataatactgcattccaattttctccacattaattttttactctaaacagttaaaatatataaagcaaaaacaccttattcacctattgtggatactagataaattattttgtgacatttatgcctatgagaacacaatgtcactggtaacttcatatcacttctcaaatattaaagtgaaagaatgacatcacttttacccatctgttatttaaaagaaaatgatgccatcttcagtctcaataggtaacgcagcagaaaagagtttccttttctgaaatcatgagggcttctaagtgtcgaaattgtttaatcatcttccatcattgataatttcagaaaaaaaagctacaacaacgtgaagaccatagttgagaaggctactttgaataaatgtgtaagagaaacaaattactgttcttcgttgaattaatcccaatcaattccagccatgcaaaatgtagcaagttgacatttaccctgttttgttataaccaccgtaagaaattttgttctgggtggttccatttacttgtccttttaaacatttttttctactgccacagtaatattagtctgaagtcttacccaaaaatatctccaagcaactgctgggtcacatgagtggtccatgtccccagaactccaaaatgtgattatcagagctgagtacagagaaataaaagctgtcacggtgaatgaccttttgttgtacttgcgagatggggaggtgtataaatttcataaatgtgtttgaaatactctggctttgtatcacaatgggttatctgaggtttgattgttttgcacttttcattagaatcagaatgtgaaatttcaggttgatttccttcatgccatcaacccaaagtctccacaaccctggcagaatttctattcttagtttcacgtgaccagctacatgatgcagtgtgaggaatcaaggttcacctagcgagtcatacagcaaaagaggacacattgcaaaatgtattgcaataaaaactcaactagttgataataaaatagcatcagctgtcctccaaagaaagttgattgatttttttttttaatttaaagctgaacaaaagagaatgatcaaggttcatggaaaaggtgacactgcaaattcattttcattatctgtgtcctatccctaagttactcggtacacacataggatgggaatactcacttgaataccatgtaattcacataaggcatgaggcacttttccagttcataacttagaagtcaccaagccttctatgtctcccaaagtttctacattttaaagggttgcataggtgatccatctgctttggggcgcccctttgcatcctctctgagacctccacttggccaactattttgggcccattttgcatcaattcaacccaacagcattatggaggctgatatgcatccaggggaatgtaagttcctagggacaggaactttgtctggctcactgctttgtcctcagcatgtagtacacagtgtagctcatggagactcctaattagctctagttaattagctagcatgcgacaaagggaattaagaagtaaggaaagctgtatacaaatgaaataaataatcacttgagcattggaggtctagcaatgctgagacactaactctataaatctgtcaagggtctgaaatttccttggttgtaataacctatttgggttaaagtgttttcaagagaccactcataggcaaattttggtggacaaagttaatatcggcccaagaaggggcatcttccaagagcagaaacttttaaatgagtccaaaatagtaaataatgatgcagaattttaagcccctctactctcagtcaacttcccttcccatgacttccctggcatttgttgagctcatttgggttccaggcaaaacctgagacaaagtcaaggcttgaaagggttggggagaggccgtatccttcaccccattgccattttcagtcttctacatggatttgtgggtgaatcagtgctgcctaccagagaccaccttggccaggataattttatttctcctaatttaaatatggaaaactgattttgagtgattttgttgtagactaaagaagaaatcagggaggaaggctaattctctccccctgcatattttctgcctttttgtctttatcaccatcaatgagtacccacaataccgattgcctttactaacagccataatgttagatggatgagactgagtgtagtgtagtgaaggcactcctctcttgctccagcaaataaaccatttttgtaactgctataaaaaaaaaccctttgaaatgattttatttcttgtttttattacaaacagaaaacataaaccatgtcacccaccatcttgtgctttgaaatatgaaagtcaaaggaaaactaatttgggaagagagatgaagtgctttgaaggagagatgaaacagcaaagttgaaagattaatgctgcatagacaaattgaaatctaaagtgaaagtttagacaacagtaatcaaaatgaatgataacacgaaaagccagcaggaagaaaacatttgagccaacaatccagtctggttcatccggataagatggttatctggcatttaatgctgtttcctacaccatgaacataagcatttactgtcatactaagaaaaagaaaagtcatccgaatttatcgctatttttacatgtagttaaattaattgttgtcatatttccaagtgaagtaacataggtttggcttttgcagtcagttcctcaagattcacaggcttggaatattttttaacaatttaaaggcccaagatttcttacagccccaagaacttttccctctctactaagcacaaatctgaacaaataattacacaccaccaacgtaaaactaggagatcttattttggtacggtctttgtgtaattttaaaacatgattttaaaaaataaattttcttacctggaaaatgctgcaatattatcagccaaagtttcttcatcatttgccccagacctgtaatagtcatatatagactttggaagtactgatttagcatgttgttcataatcattgatacaaattagccgggggagcattttcacaggttattgctatcccagatggagttcgttgtttttttttttttaatgtattgctttctacatcctcactgttctgttatttgtcaattattaatagacttttgccaaagttcagatttagttctctgttgcttacatcaagtgagcaaacattatatgcttagcctttgaaatttcatttgtaggctatctgccaaagaacaccgaagtcactatctgccaaagaacaccaaagttgaggttgggaaggcagcagaaggtgattaggtgtctatcacattaaaaaggggaaaggaataagtaaaaaattaaagacttagaggaatacctgtatgaaaccactcttggttcagttttgcctaaggctgcttattgcacatggtctgtgcctgtgctctttgcttgatacccagaataggctgcccactcattttctttccacatttggatcatgcacaaatcatgtaaacaagagcttatgaactgaacggggcatccatgaaatatggggcatccgtgaaattcagggcttctgcacaatataaaatttagctgattacaaacatagacatttggctttaacatggaacattaaggccaaattgacagctaattgttttattcattctgtatatttgaggtttacaacatgatattatgagatacatatacacagaaaaatggttacagtagggaggccaatataatatatgtatcatctcacccgtaattacttttttgtgtgtatgacaagaacagctaaaatcaacttatttaacaaaaattcctaatatgatacaattttattaactttagtcctcattttgcacgtttgctctctagaccaggggtcccaaactccccagcatggactggtactggtccgtggcctgttaggaaccaagctgcacagcaggaggtgagcagccggtgagcaagctttacagactgagctccgcctcctattgtgaactgcacatgcgagggatctaggttgcgccactccttatgagaatctaatgcctgatgatctgaggtggaacagtttcattccaaaaccatccacctacccccactgcccatggaaaaattgtattccacaaaacttgtccctggtgccgaaaaggttagggaccctgttgtagatttatgtatcctacgtgtctactattttgtatcctttgacctatatcaccccttttcctcttccctgcttcccactagtggtattcactgtttcattctctagctctgtgcatttgaagtcttttttaaaacaaaatcccacctataagtgaaataatgcaataatttcccttttgtgcctggcttatttcacttagcataatgttctctgggttctactgcaaatgacaggattcccttctcttataaggctgaataatatttcattgtgtgtatatctatacatttcccttatccatttgtctcttaatgggcatttaggtttaccattaattctttttttttttctttttgagatggagtctttctctgtctcccaggctggagtgcagtggtgtgatctcggctcattgcagcctctacctcccaggttcaagagattattctgcctcagcctcccaagtaactgggactacaggcatgtccaccacgcctggctaatttttgtatttttatttagtaaagatggggtttcactatattggccaggctggtctcaaactcctgacctcaagtgatccaaccacctcggcctcccagagtgctgggattgcaggtgtgagccactgcacatggcctaccactaattcttagagtcttatcttgccctggagagggtatagggaagtgctattccaaaagacctgtggtctcagtctataatttcactcaatcatggaacacctggggaagattcacattagtaggatatgcttgagaaagcaatgattttaactacagttagacctgagtttcaatctaggagccgccacttaaagctgcttgccagttgttcactatctacattccaaccacctacacctgtaggagaacttgctcttgaacttggagcctgcttttttcataaacatagcatgccaaatagtatagttccataccctgtggaacagccctcaatcacaagcccaagaaagttcattcttctggtgggattactcctaggattatgttctacattgcaggtttcagttatccacagtgtgagctggttgataatctatgctgtgttggctatgttccttttttgtttgttttttgttttgagatggagtctcacgccgtcaccagactggagtgaagtggcgcaatctcggctcactgcaacctccgcctcccaggttcaagcaattctcctgcctcagcctcccgagtagctgggattacaggctcatgccaccacacccagctgatttttgtgtttttagtagagatggggtttcaccatgttggccaggatggtcttgatctcttgacctcgtgatccgcccaactcagcctcccaaagtgctgggattacaggcatgagccaccgtgcccggcctggctgccttcccttctaatcagacttccctactcctcattggtgctcccttcacctcccaaataaactccttgcatttgaatgcttgcctctcagtctccttttggtgaaactcaaaccaagacaaagagaaatattcatccctaccctgaggagtgactgtgaggacaaaggatatatcatcgcttaaacacctggcatatagtaggcacagttgacctttgaacaaaaaaaagggtccacttatatgtagattttctttagattcttccacccctgagacagcaaaaccaacttctcctcttcctcctgctccttattctacacaatgtgaagatgacaaggatgaagagttttgatgtaccacttacactttatgaatagtaaatatattttcccttccttatgattttcttaataacattttcttttttctagcttgctttattgtaagaatacagtatataacacatgtaacatataaaatatgtgtaagttgattttgttattggtaaggcttccagtcaacagtaggctactagttgttaagttttgggggagtcgaaagttttacacggtgggtcggtacctctaacccccatattgttcaatgataaactgtatttcattaatattacccaccctcatcttctcaatatactttaccaacacatttttccaaaagacttttgtttaatgtcaattatataaggacaattccctaatgtacgagagattggacaaagggattcttgagcttctggaaggccattgccatttttcttcaagtaagttaatccctttgagtatttctttgctagatttgcaattagtccagtttattttctacacccccaagagaagtgtctttcataactaatgtatatttatattatcagatctttttgaaaattgccttatcccatgcttcatgaggctttatatggtagaaagaatagggtgtaaaatcatatcttacagtgggtaaataccctttgagtttattttggagaaggaaaatcgtctaagatgaagaagaatactaaggggttcagtatgtaatctgtgacttagttttgacctgtggccacagagtgaacacaaagcacggtcacctgttatatgaaattcccatgctgtgggtcaccaaaaggagcaggagagaggatatggatcaaatctatttttactactgacaaagcaactagaaaccaaagatgcaggctccatagcagcctattaggcaaactgggaatgaaaccagaaccaaaaatataagccattaggtctttcccagctgtaatgatatagtatataaaaaataaagggttttaatttaatcgaagggtcatatgctgttaaaattgacatagaattttatagtacataggtttattctcaaagttcacaaatgcttactttttgcatcaatgtagtgacagatgaaatgacatattaaaatcgctattaggatgtgaaaaatctgccaataagataagcaagttctaaataattcagtttcatagttaacaaaattattatgaaaatgtggtcaaagggatcttaattatggcttataactcattcaaaatgtaaagattaaagcatgaccttttatctgcatatttatgtgcaaatttagcatttattaaaataattagcatcctgcaactaatgtgattagaatgaagaggcaatctaatattgttaatcaggtcaagtcccggtgaaactaaagaagacacataagggccattggttcttaaagtgtgactttgaaccagcagcatcagcatcacctaggaagtcattagaaatgcaagttccaggcgtcatcctagtcctactgaatcagaaactctacagctatttgtgctgtaacaagccttccaggtgatttgatgcacaacattgtttgaggaccatggtttaggcgagatggaatgtaaagggggacttttttcttaagaggcttattcttttttataatttcaacttttatattagataccaaggcacatatgcagctttgttacctggggatatggaatgacgctgaggtttggggtacaaatcctgtcacctaggtagtgatcacagtactcaataggtagtttttcaatccatgctcccttccctccctccccactgtagtagcctgcagtgtctgttgttctcatatttatgtccatgtgtgctcaatgtttagcttccacttctaagtaagaacatgcagtatttggttttctactcttgcattaactcacttaggattatggcctccaaccatctccatgttgctgcaaaggacattattccattcttttttatggctgtacagcattccatggtatatatgtaccacattttctttatccaatctaccactgaagagcacctggattgattccatgtatttgctattgtgaatactgcatcagtgaacatatgggtgtatgtgtccttttggtagaatgatttattttcccttgggtatatgccagtaatggtattgctgagtcgaatggtagctctattttaagttctctgagaaatctccagactgctttccacagtggctgtactaatttacattcccaccaacaatgtataaacattctcttttcttcacagactgtccaacatctgttgttttttttgaccttttactaatagccattctgactggtgtaaaatggtatctcattgtgattttgatttgcatttttctgatgattagagatgctgagaatttttttatgtttcttggctgcttgtctgtcttcttttgaggagtatctgctcatatactttgcccattttttaatgaggttatttgtttcttgcttgttgatttctttatgttccctatagattctagatattaagcctttattggacgcataatttgcaaatatcttctcccattctgtaggttgtctatttaccctgttaatagcttcttttgctgtgcagaacctttttagtttaattatgtcccacttttccatttttgtttttattgaaattgcttttgggaacttagccaaaaatttcttgccagggccaatgtcaagaagagtgtttcctaggttgtcttctagtaattttatagtttgaagtcttacatttaaatctgtgatccatgtttagttaatttttgtatatggtgaaaggggtccagcttcagtctttggcatatggctggccagctatcccaggacaatttattgaatagagagtcctttccccattgcttgtttttgtcagccttggcaagagtcaaatggttgtaggtatgtggcatatttctgagttttcttttctgttccattagtctatgtgtctgtttttgtactagtactatattattttggttactgtagctttatagtatagtttgaagttgggtggtgtgatgcctccagctttgttctttttgcttaggattgctttggctattcgggctctttcttggttccatgtgaattttagaagtttttgtttttgttgttgttgttgctgttgttttttctaattctgtgaagcatgacattggtagtttgataggaatagtgtttaatttgtagattgcttttggcagtatggctgttttatgatattaattcttccaatccatgagcatggaatgtttttccatttatttatgtcatctttgatttctttcagcagggtttatagtctcctcgtacagcacttttacctccctgattagctgtattactaggtatttcatttcttttgtggctattgtaagtggaattgtgttcttgctttcactctcatcctggacattgttgatgtatagaaatgtgacttatttttatacgttgattttgtatcgtgaaaccttactaaagtcacttatgagttctaggagccttttggcagagcttataggattttctaggcatagaattatatcatcagtgaacacagatagtttgattacttcttttcctatttgggtgccttttttttttttctcttgtttgattcctctggctaggacttccaatgctatgttaaatagacatggtgagagtggggaatctttgtcttgttccagttttcaaggggaatggtttgaacttttgcccattaagtataatgttggctgtgtgtttgtcatagatggctgttattattttgaggtattttccttcaatacctaatctgttaagggtttttgtcataaagtgatgttacattttatctcatgctttttctgcatgtattgagataatcacatagattttgcttttaattgtatttatgtggtgaatcacatttattgatttttgcatgtatttcctacttgattgtggtgtatgaacttttcgatgtgctgctgggtacggtttgctaatatttcgttgagaatttttacatctatgttcatcagtaatattggcctgaacctttttatttctgttgtgtctgtgccagattttggtatcaggctgattgtgcttcacagaatgagtgaggagattcttctcaatttttttaatagtttcagtaggattggaatcagttcttctttgcacatctggcagaatttggctgtgaaaccatctggttcaggtcttttattttcttggtatgttctttattactcattcaatttcagaagctgatattggtctgttcggggtttcaatatcttcctaattcaatctcaggaaattgtgcgtttccacgaatttatccatttcctttagatattctaatttgtgtgcaaagagttgtgcatagtagtctctgaggatcttttgtatttctgtatttttgtattttgtatttctgtagttgtaatattgcctccgttatttctggttatgcttttttggatcttctctttttctttgttagtctagctggtagtcaatcaatctttttttttttattttgaacaaccaactcttggtttcattgatgtttgttttgtttgtatttttgcatctcaatttcattaagctcttctctaatttagctcttcttttcttctgctagatttgagtctagtttattctctttttttcacttcctttaggtgtagagctagtctgttgatttgaaatatttctaacttcttgatgaaggcacttagggctataaactttcctcttaacaatgcattggctgcatcccagggattttgctaagttgtgtccctattttcattaatttcaaagattttttttatttctgccttaatttcaatgtttactcaggagttattcaggagcaagttgtttaacctccatgtatttcagtggtgttgagagattatcttgataatgatttctggttttattgcacatagtctgagagtgtgcatggtgtgatttcaattctttgaatttattgagactggctttacgactgagcatgtggtcaaccttagaacatgttccatgtgcagatgagaaaaatatatattctgtggttgctgggtggagtgttctgtagatgactattaggtccaactggtgaagagttgactttttccagagtttctttgtcggttttctcccttgataatctgtctaacactgtcagtggggtattgaagtctcccctattagtgtggggttgctaagtcttttcttagaccaagaacttgcttaattaaacagtgggctccagactgggtgcttatatatgtatgatagttaaggcttcttgttggattgtaccctttatctttacgtaatgcccttcactgtccttaatatttattggcataatgtctgttttatctgatgtaagaatagtgactcctactcttttttgttttccatttgcgttgtaaacctttcttcatccttttactttgagtcgttggtgtcattacatgtgcaatgggtcttgtgaaggacaacagatgattaggtcttatcattttatccagcctgacactctatgtattttaagtggggcatttggcatatttgcatttaatgttagtattgatatgtgtgattttaatcctgtcatcatgttgttagctggttgttatgtagacttaattgtgcagttgttttatagtgcctgtgggctatgtgcttacacatgtttttgcggcagcaggtatcattcttttgattccatgttttgcactccctaagggcctcttgtaagactgctctaatgaaatgtactctttcagcatttgcttatctaagaagtattttatttttccttcacttatgaagcttagtttggttggatatgaaattcttgtttgaaatttcttttcttttagggcagtgaaaatagacccctaacctcttctggcttgtaaggtttcttctgagaggtctgcttctagcctgatggggttccttccataagtcacctgccccttctcccagctgcctttaagatttttttcttttgcattgtcattggtgaatctgatgactgtgtgccttggggatggttatcttgtatagtatctagctgaggttctctgtatttcttggatttgcatgtcaacttctttagagagattaggaacattttcacaaattacctcttcattaaatatattttccaggttgttcatttcctctctttctctctcaggaatgccaatgagatgtagatttgttctctttacataatcccatatttcttggaagttttgttcatctttcttatttctttcttctttatatttatctgactgagttgatttgaagaactggtctttgaactctgagattcttgcctcatcttgttcttttctgctgttaatacttacaactgttcaacgaattcttatagtgaattttgcagttcaaggaatttagtttaggtctttcttgaaatggctactttgtctttcaactcgaatcattttactggattgcttggcttccttggattgagttttaacttattcctggatctcaatgagcttccttgccatccagattttgaattctatgtctctcttttcagactttcacactggttaagaaccattgctggaaagctagtgggctcatttgaaggtaggaggacactgactttttgaattgccagagttcttacactgattcttttgtatctgggagagttgatgttcctttgactgtgttatacattgaatatagtccattggcttcatttctggaagtattcagagagctaatgctctgtacagggtctttgttgttgaattattataaatattatggcatcgatgaatgcaggaacactaggttttttgtcttgagttgagttagataagacatgagcacccataagaagcttaaattaaaaaaaaaaatccactttttttctttttgtactactgcagcccaacagttgatttggtgtaccatcttagtaggtaaattctgaaatgcagtccccacattgcttaatctcttggtgggtagaatgaaaacagtggttggagattagaacagcttttgttaatttgcaatgattgcattgttaaaatatctcacattctatcagacacaatacattctttaaaacttctctccaggtctctgaagtcagatgctaaagaggcacaccacagcaaaacaagttcaggtcttttcaagctgctaaatgttacatttgcacactcattgcccccactatccccacaagtttgggaatcagaatggtaaacatcaatgcaaatggcatctgctgggttcaggccccctccttcaccgtggccagaagaataggctttggtgtttttgtgttttcttgccactggacttaataaaatcttaacttctaatcctccctaatatcccaataaaatctgcagaataggcagggtatggtggctcacgcctgtaatcccagcactttggaggccgaggcaggcggatcacctgagatcgggagttcgagaccagcctgaccaacatggagaaaccccgtctctactaaaaatacaaaaaaaattatctgggcgtggtggcatacgcctgtaattccagccacttgggaggctggcacaggagaattgcttgaaccctgaaggcagaagttgtggtgagccaagatggcaccattgcactctagcctgtgcaacaagagtgaaactccatctcaaaaaaaaaaaaagaaaacaaaacaaaatctgcagaataatgtcccgacatctccacaacctttggatattttccaaaccacaaggccatcttgaggaactctctcctgttcctttctctcaagggtaactaagcacaacctggaaggaagcaataagaacttcacatcctcaactggatttttttcattatttgtcacagatgtaatttatactattacatctattactattacactgtttagagaaatgtcatatttcctgtttttatccttttaagaggcattttattttaaatgagggatagagtttggttgagtcttagttatttccatccttctagacattagaagaggttaagttgtctcaagcgctaatggctgggagaaacgggtatcctggacagctggaaagagtgccccttacaagtataaaaaccatttcatagtggttttactttacatcctttttttttaatacatgtgcacaacctgcaggtttgttacatatgtatacatgcgccatgttggtgtgctgcacccattaactcatcatttacattaggtatatctcctaatgctatccctcccccctccccccaccccatgacaagccccagtgtgtgatgttccccaccctgtgtccaagtgttctcattgttcaattcccacctacgagtgagaacatgtggtgtttggtttcctgtccttgcgatagtttgctcagaatgatggtttccagtttcatccatgtccctacaaaggacatgaactcttccttttttatggctgcatagtattccatggtgtatatgtgccactttttcttaatccagtctatcattgatggacatttgggttggttccaagtctttgctggtgtgaatagtgctgcaataaacagacgtgtgcatgtttctttatagtagcatgatttataatcctttgggtatatacccagtaataggatcactgggtcaaatggtatttctagttctagatccttgaggaatcgccacactgtctttcacaatggttgaactagtttacagtcccaccaacagtgtaaaagttttcctttttctccacatcctctccagcacctgttgtttactgactttttaatgattgccattctaactagtgtgagatggtatctcattgtggttttgatttgtatttctctaatggccagtgatgatgaacattttttcatgtgtctgttggctgcataaatgtcttcttttgagaagtgtctgttcatatcctttgcccactttttgatgaggttgtttgattctttcttgtaaatttgtttaagttctttgtagattctgaatattagccctttgtcagatgggtagattgtgaaattttctcccattctgtaggttgcctgttcactctgatggtagtttcttttgctgtgcagaagctctttagtttaattagatcccatttgtctatttcagcttttgttgccattgcttttggtgttttactcatcaagcccttgcccatgcctaggacctgaatggtatggcctaggttttcttctagggtttttatggttataggtctaacatttaagtctttaatccatcttgaattagtttttgtataaggtgtaaggaagggatccaatttcagctttctacatatggctagccagttttcccagcaccgtttattaaatagggaatcctttccccatttcttgtttttgtcaggtttgtcaaagatcagatggctgtagatgtgtggtattatttctgagggctctgttctgttccattggtctatatctctgttttggtaccagtaccatgctgttttgcttactgcagccttgtaatatagtttgaagccaggtagtgcgatgcctccagctttgttcttttggcttaggattgtcttggcaatgagggctctttcttggttccatatgaactttaaagtagttttttccaattctgtggagaaagtcattggtagcttgatggggatggcattgaatctacaaattaccttaggcagtatggccattttcatgttattgattcttcctatcaatgagcatggaatgttcttccatttgtttgggtactcttttatttcattgagcagtggtttgtagttctccttgaagagatccttcacatcccttgtaagttggattcctagctcttttattctctttttagcaattgtgaatgggagttcactcatgatttggctctctgtttgtctgctattggtgtacaggaatgcttgtgatttttgcacattgattttgtatcctgagactttgctgaagttgctaatcaacttaaggagattttgggctgagacgatggggttttctaaatatgctatcatgacatctgcaaacagggacaatttgacttcctcatttcctaatcgaataccctttatttctttctcctgccttattgccctggccagaacttccaaccctatgttaaataggagtgggaaagagggcatccctgtcttgtgccagttttcaaagggaatgcttccagtttttgcccattcagtatgatattggctgtgggtttgtcataaatagctcttattattttgagatacatcccgtcaatacctagtttattgagagtttttagcaggaagggctgttgaagtttgtcaaaggccttttctgcatctattgagataatcatgtggattttgtctttggttctgtttatatgctggattacgtttattgatttgcatatgttgaaccagccttgcatcccagggattaagccaacttgttcatggtggataagctttttgatgtgctgctggattcggtttgccagcattttattgaggatttttgcatcgatgttcatcagggatattggtctaaaattctcttctttggttgcatctctgccaggctttggtatcatgatgatgctggcctcacaaaatgagttagggaggattccctctttttctgttgattggaatagtttcagaaggaatgataccagctcctctttgtacctctggtagaattcggctgtgaatccttctggtcctggactttttttggttggtaggctattaattattgcctcaatttcagagcctgttattggtctattcagggattcaacttcttcctggtttagtcttgggagggtgtatgtgtccaggaatttatccatttcttctagattgtctagtttattcatgtaaaggtgtttatagtattctctgatggtagtttgtatttctgtgggatcagtggtgatatcccctttatcattttttattgcatctatttgattattctctcttttcttcattagtctgactagaggtctatcaattttgttgattatttcaaaaaaccagctcctggattcattgattttttgaaaggttttttttgtgtctctatctccttcagttctgcactgatcttagttatttcttctgctagcttttgaatgtatttcctcttgcttctctagttcttttaattgtgatgttagggtgtcaattttagatctttcctgctttctcttgtgggcatttagtgctataaatttccctctacacactgctttaaatgcgtcccagagattccggtatgttgtgcctttgttctcattggtttcaaagaacatctttatttctgccttcatttcgttatgtacccagtagtcattcaggagcaggttgttcagtttccatgtagttgtgtggttttgagtgagtttcttaatgctgagttctaatttgattgcactgtggtctgagagacagtttgttatgatttctgttcttttacatttgctgaggagtgcttccaactatgtggtcaattttggaataggtgtggtgtggtgctgaaaaaaatgtatattctgttgatttggggtggagaattctgtagatgtctgttaggtctgctttgtgcagagctgagttcaagtcctgaatatccttcttaactttctgtctcgttgatctgtctaatgttgacagtagggtgttaaagtctcccattattatcgtgtgggagtttaagtctctttgtaggtctctaaggacttgctttatgaatctgggtgctcctgtattgggtgcatatatatttaggatagttagctcttcttgtttaattgatccctttaccattatgtaatggctttctttgtctcttttgatctttgttggtttaaagtctgttttatcagagactaggattgcaacctctgcctttttttcattttccatttccttggtagatcttcttccatccctttattttgagcctatgtgtgtctctgcacatgatacgggtctcctgaatacagcacactgatgggtcttgactctgtatccaatttgccagtctgtgtcttttaatgggggcatttagcctatttacatttaaggttaatattgttatgtgagaatttgatcctgtcattatgatgttagctggttattttgctcattagttgatgcagtttcttcctagcatcgatggtctttacaatttggcatgtttttgcagtggctggtactggtttttcctttctatgtttagtgcttccttcaggagctcttgttaggcagacctggtggtgacaaaatctctcagcatttgcttgtctgtaaaggattttatttctccttcacttatgaagcttagtttggctggatatgaaattctgggttgaaaattcttttctttaagaatgttgaatattggcccccactctcttctagctcgtagagtttctgccgagagatccactgttagtttgatgggcttccctttgtgggtaacccgacctttctctctggctgctcttaaaattttttccttcatttcaaccttggtgaatctgacaattatgtgtcttggggttgctcttctcgaggactatctttgtggtgttctctgcatttcctgaatttgcatgttggcctgccttgctaggttggggaagttctcctggataatatcctgcagagtgttttccaacttggttccattctccccgtcactttcaggtacaccaatcaaatgtagatttggtcttttcacatagtcctgtggggaaaagaaagagagatcagattattactgtctccgtgtagaaagaagtagacataggagactccattttgttctgtactaagaaaaattcttctgccttgagatgctgttaatctgtaaccttacccccaaccctgtgctccctgaaacatgtgctgtgtcaactcagggttaaatggattaagggctgtgcaagatgtgctttgtaaacaaatgcttgaaggcagcatgctccttaagagtcatcaccactccctaatctcaagtacccagggacacaaaacactgcggaagtccgcagggacctctgcctaggaaagccaggtattgtccaaggtttcttcccatgtgatagtctgaaatacggcctcgtggaaagggaaagacctgaccatcccccagcccgacacccataaagggtctgtgctgaggaggattagtaaaagaggaaggaacgcctctttgcagttgagacaagaggaaggcatctgtctcctgcccatccctgggcaatggaatgtctctttgtaaaacccgattgtatattccatctactgagataggggaaaaccgccttagggctggagttgggacacgcgggcagcaatactgctctttaaggcattgagatgtttatgtgtatacatagctaaagcacagcacttaattctttaccttgtttatgatgcagagacttttgttcacgtttttacctgctgaccttctctccactattatcctatgaacctgccacatccccctgtccaagaaacacccaataatgatcaataaatactaagggaactcagaggctggtgtggatcctccgtatgccgaatgccggtcctctgggccccctttttctttctctatattttgtctctgtgtctctttcttttccaagtctctcattccacctaacgagaaacacccacaggtgtggaggggcaacccacccattcatagtcccatatttcttataggctttgttcatttctttttactcttttttctctaaacttctcttctcgcttcattttattcatttgatcttcaatcacagataccctttcttccacttgatcgaatcggctactgaagcttgtgcatgcatcacgttgttctcgtgctatggttttcagctctatcaggtcatttaaggtcttctctatgctgtttattctagttagccattcgtctaatcttttttcaaggtttttagcttccttgtgatgggttcaaccgtcctcctttagctcagagaattttgttattactgatctcctgaaacctacttctgtcaactcatcaaagtcattttccatccagctttgttccattgctggcaaggagctgcgatcctttggaggaaaggaggcactctggtttttagaattttcaacttttctgctcagatttctcctcatctttgtggttttatctacctttggtctttgatgatggtgacctaaagatggggttttggtgtggatgtcctttttgttgatgttgatgctattcctttctgtttgttagttttccttctaacagtcaggaccctcagctgcaggtctgttggagttggctggaggtccactccaaaccctgttttcctgggtatcatcagcggaggctgcggaacagcaaatattgcagaacagctaatgttgctgcctgatccttcctctggaagcttcgtctcagagggtcacccagctgtatgaggtgtcagtcagctcctactgggaggtgtctccaagttaggctactcgggggtcagtgacccacttgaggaggcagtctatctgttctcagatctcaactccatgctaggagaaccactgctctcttccaagctgtcagacagggacgtttaagtctgcagaagtttctgctgccttttgttcagctataccctgcccccagaggtggagtctacagaggcaggcaggtctccttgagctgcagtgggctccatccagtttgagcttcccagctactttgtttacctagtcaagcctcagcaatcacagaccccctaccccagcctcactgcagcctcactgctgcctcacagttcgatctcggactgctgtgctagcaatgagcaaggctccatgggcatgggacccaccaagccatgtgcgggatataatctcctggtgtgccatttgctaagactgttggaaaagtgcagtattagggtgggagtgtcccaattttccaggtaccgtgtgtgatggcttcccttagctaggaaagggaattccccaaccccttgcactttccagttgaggtgatgccccaccctgcttcggctcacactccgtaggcagcacccactgcccaaccagtcccagtgagatgaacctggtacctcagttggaaatgcagaaatcacctgtcttctgtgttgctcacgctgggaggtgtagacaagctgttcttattcggccatcttgaaacaatcctcactttatatctttttatatgtttattggcctttaattttttcacttttttgaaatgtctttagcctttttttatattacagttgttgttgttattgattgataggctttctttatgcttttttggacatagatctttgagattatatgtgtatgagttacatttttcctaggtttacttgttttcacacatgaataatgccaatgtcagcctcaaacctgcctaattgagagcatgtggttggtttttctggtttttttctctttcttcctctctctccctccctcccttcccttttatttcattctttccttactttttctctccttgttttcatatttacttattcactcatttatttttaaagacagggtctcacactgtcacccaggtgggaatgcagtggcacaatcgaagctcactacagcctcaaactcctttgttcaagccactctcccacctcagcctcctgcatagctaggactaaagacacatgccaccacagttgacttgatttttgttttttgtttttttctggtagacacagggtcttgctatgttgcctggcctacctggtctcaaactcctagcctcaagagatctttccacctctgcctcccaaagtactgggattacaagcatgtacaactgtgccccccactcttcatctttaacttaatgttctttgtcttcttttatttcttcttcccttttctctccctcctcacctttattttcttcttcttgttcctctttctctctcactctgtctttccatgttgcaatcataacctagttctagataggcaagtggcctttagctagattttttagggttttgtttttgtttttgttttgtttttctggttcatgctttaaatgtgttgccctttgaggtcctggatttaagccaggctgaataggtatgccagtggttacaagcttctgggaaagatctccctctttcatgctctataacaacaatacaacttggcaagctgttgcctgggggtggagtgaagatagaaatgagagtgagaagtgtttgcatgtattgctcaattatctcgagttaacaaccttttcagtactcacctttaaagtaatatggtttgcctgcacttcccccagcaaccatgaagccattaaaaatagagctccaatgcaggattgggttcagcacatgctcttgggggtaaagcagctttaggactctgcttacttctccaggttcttactctcacagattttggtctgtttattcattattattttatgagcattttgatatcttcagaaatataatttgttatatctcaaataactactgtttttagcaggatgattgaactggtatattttagatccctcagtatgaatatgggaaacaaatcattttactactaactacaggtcataaattattagttttgcttggttttatttcattatcccatacccagtatggaaattttcccttggatcaccacctgcattgaaggattttcctctactatccttccactgaggatgtcgtctttcaggttcccatcattatatgggagtctctatgccttagtctccgcatccacatgtagctacacacaggtgctctataagggcttagtagatgatcttgaggaaatagtgtgcttcagtgccatttacctgcctgttgaggttgtacttgtttttggtagttcttttcgttttattttatatttgggttcttgagaatatccattactttcttgccatttcagccacacatagtaaaatatgcttataacattttatctcacatctatagatgttttgtaaaagactttacttcagtaaagctagtccacatatttctaaacattttaattatggttttaattatggacctgttgttgtatagaaatttaaatgtttattatagtgaaagatatcaacagtgctactgaggatctgggctttttagtctcgtttggaaaatccttctgcagtcttaaaaacattttctcatgttttcttccatctggagctgatctttgtgcactgtgtaatcactattttatttctgttagcaaagtgggccaaatatttggtttaacaaatatatccagttctttccttcaaggcacatagtgaaattgcatgtactagtttccttgtggatagggccatgctggttctgggccatatgaccagttcaggacaatgaattgttcatgtctgatgatcaccaaattggggttgaagcatttaactgccagtgcaagacctgtcttagctctcttttccttggcagatcagcaagctgtattctaatggtagctgctttgtcagcctggtgaagatgagaagagtcccaggcaatacatgactggcaaatagtatgtgactttgaatgccaaaaattatatctttgatatccaaagtcacataatgtatcttagtcttactgatatacataaggtccaagataagaattaatttatttttccaaataagtaacctcactctcaccctcactcatctcaccctcactgagtgaaaagcccctctttctccattcatttaatgatacttgttaagacagaatatttcataccatggatataaccaaaaactaatgtttctgtttaatcaaaaaaaatttcccatgtagacataaacatattttcaaggttgatgatgaaataagatggataatggatgctagaaattatgtttcctgtaagcagcatgaagaaatctccaaaggaggctatttctaaaacacagttgtaattggaaccagtgagcgagagtaggctgctaatgggatgtcatgctttgattttagagatcaggaatccaaattgaaataccttaaacagtacagttttgtttaaactatagtcctctgctaggaggaaaagttcccaatatttaaaatgggacaatttcttcaggtagataatttgaatttagagaggaagggtagctttacctgaaaggtgatgctgaaaggaaatcactgcacttggaggcacatcctggaatagactctcatcctgcaggctgcttatcttggaggatgagacacagatgtgtgtggtattcctagagctattgaattatttaacccttttatgaattttgttgatgactttttttttttttttttgagacagggtctcactctgtcatctaggctggagtgcagtggtatgatcatggctagcaaccttgaactcctgggctcaagtgatcctccagcctcagcctcctgagtagctaggaccacatcacacccctgccccaccacatgcccactgcccagctaatttaaaaaaattttgtagagactgactctgggtctgactatgttgcccgggctggtctggaactcctggcctcaagcagtcctctcacctcagcctctacggatgactattaacagcatatttataaatataacatttaaaaatatatgtaaattatttctgatcactaaatgctgagtcatattgaagcatattagaaaactagaaaatcgttaggatgaatttcttttggaaattactaaaaaagagtatattgttatgtgaaatatgtgtgggagccatgcaaatgtattataagcatatggacttgggaaaaggagcacactgaatgaatttttacccctcctctcctcattttgtccataagtgtaaaaaattaaaaactcattctttttaagatatgtaaaatggtttttaaaacattctgatacttcaactcaattgctggaaatatcctttgtggtaagcaaagatagttgcctattcacgaaagattcaaaagatagcataataagaaaacaatatttggccaggtgtggtggctcatgcctgtaatcccagcactttgggaggccgaggcgggtggatcacctgaggtcaggagttcgaaaccagcctagccaacatggtgaaaccccatctctactaaaaatacaaaaaattagctgggcatcatggtgggtgcctgtaatcccaggtactcaggaggctgaggctggagaatcacttgaacctgggaggcagaggttgcagtgagcccagatcacgccattccactccagcctgggcaacagagcaagactccgtctcaaaaaaaaaaaagaaagaaagaaaacaatgtttatcttctactttattattatggagggattgtttggcaggactgtttcttttatctgctttggtaccattagtagcaaatgttcagtgtgaccaacataagctaatgatgtgaggactgatactaataattttttaaaattctcagtggaaatcatgagtttacccagcatcagatttcataagctataataatatagtctctttgcttttcactgtaaatatattcattgaatattatattggtatgtattatataatatgattatgcataatatatcattctaatatatacaattaatatgtaaactcactcaacaaaagatatacagatcttcagctaaggcaaaattggaaaacattaattcttcttatgaaaggcaatttctgtggttgtcccttctttagaaacattgggtcaagtggcatgaagggtgacggaaataataaatgaagtcttcattcctcagtggcaaacactggaactaccaccctgatctatgcagagaatgtttcagcatcattctctgccagttaactccagtattcatatattaccaagtgttttttttgtgtgtgtgtgaattaatattaaatctaggtacatcaagaatcttccaaattttatattgtcaggtcctaggaaacagaaacgatggttaaatctcatattagtacactagactacccaactggcatgtgttttatttgttaataaataaaattttaaaaatgctctccatcttccaccggtccccttgccactcccctaaataacttaagacggctggcttggctgggaggcccactctttgcccttcccatcttctttcctctttctgttcagaatgcagaaagatccagcggcatcttgggatgatgagattccacgagagtgggggccagagataaaggtgacagggcagaaagagacaggatcctgggtcctgaggcccacaaagatgccatacaaacccccaaccgcttgcctcctgacttctttcacacagcagaacatgacctcccatatgtttggaatgtctttttttttttttttgagatggagtctcgctctgtcgcccaggctggagtgtggtggtgcaatctcggctcactgcaagctctgcctcctgggttcatgccattctcctgcctcagcctccctaatagctgggactacaggcgcccgccaccacgcccggctaattttttgtatttttaatagagacagggtttcaccgtgttagccaggatctcctgacctcacgatccgccctcctcggcctcccaaagtgctgggattacaggtgtgagccaccgcaactggcctggggtgtcttttactagcatccaaacgcagctcctcagtgacccaggtctcagttcactgtgatgcccaagacaggatgtaacaaagttaacaacaagatatatattatatttacatacatagatacatgcacatatactatacacacaatgttttatatatacaaataaatgaaattgcagtttaccttacatataaagtaagctgtaatttatggttagctgaaagttaattgtagcaatagtctaatatagtatctgtaagaccagagatactagaagtcattgaaattagtctcatggagtaaaatcccagaaatacgcattaaaagtgattcttggtttgttttctctagcatgggtgtgtgtatgtgtgtgcatattctgtgatttttatactcaatattataagaaaaatcttgatttgacagttctgttctggttcttatcaactgaaatattttctcaaactcctggcctcaagcaatcttctcacctcagcctcccaaagtgctaggattacaagcatgagccaccgtgcccagcctcaagtgaaattttctaaagtaatcaaacactgtcagcgagggcggaacagaaactgtgagaatattcgaagtgcccaagaatgtagcttctgatgccacaagagtagaatgatggattgccctccagtttccttgtaaaatcctcctataaaaccatgtgccaaaaaaatggaggacctcatagtttgttacattataaagagataaaatatctaatcaactgcaaagacaggtcactttgcattttgaaatcctaactgaagaagttatctgctctatacaaaaagatagatacaagacaaatattccaaccttgaaccccagcatctaagtggatattaaccctaacagttgtgtcagggtactgccaatgggattctgtcctgagtaatgggccttttttcttaatgaacccatttaacagctgtcaagttcaaagaaagactcaatgtgttaaataagaccatcactatcccagatctctcctggatattaaaaaacaaaagaatgtccaaggttctgtaaactcttatgaatttaccttatgtgaatagcctcattataataaggaaaacaaagactgcttgtcaacttctatgcagcacccagggaagtatacctattttcgttatagaaaataaaagcagaccatttttcaggtgttccattttttatgtctctgtaaagccccagcaatgggtaactcagaggcacatcataggtttttccatgattggctttctttccaagttacaatgagacaatgttataataaaaccctgttggtgggccaggtgtggtagctcacatatgtaatcccaatactttgggagactgaggctggaggatcccttgaggctaggagttcgagaccagccttggaaacatagcaagacctatctattcaattagaagaaaaagagaggcctggctctgttgctcacgcctgtaatcccagcactttgggaggccgaggcaggcagatcgcaaggtcaggagattgagaccatcccagctaacacagcgaaaccccgtctctgactaaaaatacaaaaaaaaaaaattagctgggcatggtggcaggtgcctgtagtcccagctactcaggaggctgaggcaggagaatggcatgaacccgggaggcagagcttgcagtgagccaagattgtgccactgcactccagcctgggtgacggagcaagactctgtctcaaaaaaaaaaaaaagaaaaaagaaaaaagagagataaagaaagaaaaagaaatcttgcagctcttttattttctcagccttgctttacccactgtggaataactcctgaaatttaaatgaacagagatttaagaattctaccttaccccttccttaagagagaaaaatcatacacaaaatagaaacattgataataatatggtgaatttgcagcagaaagagaattagaaaaaaaaaaatctatccgaacattttcaatatcaagcaactgtcaaaatattatctaagtcaattgttccctctgacctcttatgtcacttctggaaacaataacattagcctcgttttcacacaagtcctcagcacacacgcttctacctttttctccactttagtatctgcatttatctctttagttagacagtcgttagacaacactgggaagcaggccagctcacagttcttaccccttttatcttaataggattttccagaaatcatgtggatagatatgatacaaattattctgccccttcagctttcagtaacaggaaagtttctgttaataaggtttcagtattgacaggcatcagtattttccagaaaagagatagcatcatttccaatttacaggaaacaatttctcaatggacagttgaaaaagcatagaaatacaaagtgatggacttaaaaattacggtcatatagtcagatttttattttagtcaacatttctaagtagaaagaaaatgcgtttttatgattcttctagtctggagttatctactgctgaaaaaatataataatattattaataaatggttcctgcacatagaggatatgtaaggtctcaaaatgtttagatacatacaaaatgagcagtacttggaattcaaatttgactagtgaggcacataatctatcagtctatctgcctttttttcaccgcctttgtttggcacacttacagaaaagcaacaacttccaaagtagtttcccaaactaggttccatagatttctgataaatattccttcacagagagtatctatatgtaggaaaaaaatatgtatgtgattcaatggaaaattacgattgtttagatcacaacactccagattatctgatacttatctgtcattatctttgagctattttacaaccctatcagttgtagatgtctgatggaaatacaaaataagatattcagttctaacagtagcttaatctaataatttcatctttcatgatcattcacccatgatgcacaagccaaaacctaggaaacattactaattcttttccctttcatcatggacatctaattcagtaaaaagtcctatttgttttaacatgaaattatatcccaattcccaccattaaatagcgtgtgaatttcaaccatcctcatccaagcctcatcctctctcatttgaactaatgaccagatgatgaaacttaaaaacttaagtcagccaggcatggtggctcatgcctgtaatcttggcagtacaagaggtcaaggcaggaggatcccttaaagccttaaagctcgacaccagctggggcaagaaaatgagacctcctatctctaaaaaaaaaaaaaaatttaaattagccgggcatggtggcatgtgcctgtagttacggctactcaggagggtgaggcaggagcccaggatgtgatgtaatgctgaaagtaaagattggaatgatagaacacaagccacagaatgctggcagtctctagaagctggaagagccaatttcttccctgaagcctccagaaggaatgcaatttactgacactctgattttagctgcctaagactcataacttctgacttccagaattgtaagataataaatttgggttattttaagccactaaacttgtgaaaatttgttactgcagcaatagcaaatcaagatagatgcattcagtacgtattggcttaaggaatccattcctcaacagaggcaatatatagtcaggtgctgcaaaacaatgttttggtcagcacacatacagacagagctcatatatgacagtggtcccataagattataataccatatttttacaaaaccttttctatgtttggatacatttaaataaacaaataacattgtgttacaattgcctacagtattgagcacactaatatggtgtgcaggtttgtagactaggagtaataggctacatatagcttaagtgtgtagtagggtctaccatatagatttgtacactctatgatgttcttaacaataaaattgcctaatgacatatttctcagaatgtgtcttcatcattaagcaatgtgtgactgcaataatgatttggcacacagattgagaactaagacttttggggttcaaatctcatctcataatgagatagtgcatataaaacactcaataaatgccagctgtattactgttgtgttttatagctcaatgagaagtcctcgtcccgtttcttaacactggctgcacattaaaatcacttgaagaggtaaaaaatgttcatgctttatctccagaaagcagggccagctacataatttgcaagctccatgcaaagtgaaaatgcagggcatggtggctcatgcctgtaatcccaatattttgggaggccaaggtgggagaatcgctgaaacccaggaattcaagaccagcctgggcaacatagcgagcccccatctctaccaaaaaatacaaaaattagccgagcgtggtggcacgtgcctgtagtcccaattactccggaggctgaggcaggagggttattgcttgagcccaggaggtcgaggctacagtgagccacaattataccactgcaattcagcctgggtgacaaaatgagatcttatctcaataatactaataaaatataataacaccaacaacatagcatctaagcacagctctgggcccttctgggcatggaatcctatgggactgcagtcacatccttagaggctcaccttgctcaagggattgtgaaataattctgaaataaattatctgtaacgtttaaaagccaagttattctagtataaaatcccaattgagaaccaccagtgtagtccaacaatatcatttaataaataaaaattactgagccccgtgtccaatgctggcttcccagaatctccctacaacaacctattcataggacaaagttgagcttatagattactacggtatcacagcactacctcaacagtcttaattgtatctcagagggaggaatagcaaaattgggagatttattgatatttggaagtttcctttaagtatttctttgagagtggcaggaggattggttaggcctgggtaaggatcagagtacaatagcgtaggatcagtgaacactgtaaggcaaaaaaacttgaacagtatcatttgatgccttctattgaaaagtctgattagtcttttagaaagcttctggagaaaacacaatatagttatttgtaactttcatctttctgatcaagtgttttctggaataataaaattatgttgatgaagactgtggaataatcaagtcagattaatttggatactaagccatagatagcttggattctgaacagaagggttaaatgatttacatagtattatgcaagtagtgggtaagtcgagggagaccttaagtgttctgactcaaaggtagtgctcacaccaggctgcttctacagaacacaggaatctaaatcaaaccactcacgttatcataattttcacaaaacacatttcaaaagacagtatcttcaactggcattacacttccaaaaaaattgttaagtagcaattttcagttggattattataacagaaaagctcaaagtattcatttttcatcattaaagagctattttccagtccaaaggtaaattatgagagtttctgaggattttgaaatggtgccacacttaggtaataacaaatctgtaaatctcatggttaagtttatagcagaaaacactgagttggttcaggaaatcagaattcagaaggcttcataaattattattttatggcggttactgtaaattgagacatattctagtctttcagcctaagtgctttctttctttttatttttttgtcaaatgatgcagcaatgcatgttttagaaatttttacaagaactctcaatctttctgtgttcactgagttatgtcgagaatagaagtcgttgttgaattttagctaaactagagaagttgtagctctaaagaatcagcccgcacttgtgcaaactttcacaataagtcttctcgaatatcccattggctttagatttttttcttttacaaaaaagaaaactaattaagaatgatctctgtgactggaaggctatttccttgagtacacaagaatgaaatgagacgaactaattcctctggataaatttttacatataaaattaaattgctttcagaattaaataccttggccattccatactcttgttttgtaacattatgacagtgacatggagagaaaaaaagtggcagaaggacaattcttttcttatgctggagcagcaagtgtgagattttctttttctacaccctcaaggttaactcacttctgggcatacaggaaaaactgaatggaattaatgtcactaacttggaaactcagtataacatctttcactcaaatgtgaacttgctataagtaaatgttggggaaggaaagaagaacaattgtcttatttctggttttagatcgaagacccaaagatggtgatggtgaggtagtcagcaaaaatatagtccacagaggtaacaaattatatcagctttaatttgtaagtgtttgatgatttcctcctggcctcagcaaggaataacatagctttctcctgtttcttccttcgtccgctccacctaccctttgaacctattatacaaactcagggcagtcaggtaaagaggaaagagaaaaatagaaatatttgtagtggaaaaggttgagacttacaaaaggagaaaaattgggcttgaaagagaaggagaaggaaaaaagcaagagcttatgcaaaaagcatggaagggaaagtttgtgagggaagaaaatggagaataggaaagaaggtagaagtcgaagaatagccccagggacccatgtatgagagagtagaataataaaagaaatgcatggagcttttaagaaatgttagtctagataataaattagactctcattatttttccagagataaaataatttatgtttctggctcctgggctgagtttcatgggctagaaatactgggccatgaagaatcatggaatttagatgggttacattctagacatgaatccacaggtctttgagtgtatgttgtgatacccaattgcaccttgatttaaattattacctgagtcaatagtgtatacttggcatgaaaaccagactcttggaacaacagaataaataaatgagaaattaagagtgagttcttataactccagaaagcccaagcaatgtggttgaggctttgataaaataaaaactgtaatttggtagggaggaggacagacgcatggttccaatttgaatatcagacttatgaaacaaacataatgcagtaaaattgagattatctttaaaagaaaaatatcccttgtgaaactgcaaacttgacattaagtttaagacagcttcagtggccctctcatttctcaagaacatacattgcatccctaacagaggcagacagccagtgtcaatcctgcttggagcagtcaaatccgctgcctgccctactgtgctgagcacattcattccaaaggcatctggctgctgccatggaagtcaacttcaaccaggctttggaactgttgcagcaggctaatagctcccagaaacttgagaaatttgtggaaaataacaggccaaggaagggccaaatcaaaaaaccttgagttgtgatttgagcattgcactaaaatgttataagatgtatggacacaaaaataagaaatgcagcacctactatcctacaccaggggcaatttataaagttaaagctagaaaagctgccattcatgttatagatgtttctgagaggatgtagccataagaagtaagtggctaaaagaattcctaaggtggaatgtctgccaggagtgatggaaggaggcttggcaaatgtcctggttggagcagatgggtgagcaagccatgattttctgggttttaatcctgaagcaagagtcatatgacctctcattattggtgaagatgacctaacctgaggaggacaatgaatgaaatgtaacgcctccaagaccatctaatggggctcacactggaggctttgagcagatttagggagctagaagtcatagtaaagacactccatcttcgttagtctttttataagggtgaacataagcaggatccaaatcccaagcatgggcccacagagagctcttcttggagactgggcaccaatttgcctccagggcaagcaggtttcctgcaatgagagattttaagaactcaacatggatgagtccacatgagggtcacccctgtctgcctagccaaactgggaggactggacatgattggtgtttacttctatcgtggagaagaggagcatctagtgatagtttccaccctgagggtatttaatactaaatcatctttctttacccgaggaatggggactggaggagaggactagaaagtctccaaatggggaagggggagggagagtgtcattaaatcctaaatgtaatatgttggccatcagggagttctcccattctctgcctacaatgtttgcagagaggacaatgatgaattttggtggaggaagctaagcttgaacttctttgcgaagtgcctgacaggaattttgatctacccagtatacattagagaagttggggggcagcagatgtaaagtgtaatagacacataggctcagctctttttgacacatggatattcatggcctcccacccacctcctccccagtcaaggaaaattctggcaatgccattttggtatttactactttcctggagctccatggctttattatgcagtgagaagaatcttataagcagagatgggatatctgttagaagggaactgtggagaaaggagctttctctcaggagtaaagacggaggagtagtaggtaagaggagagtggttaggaaaagagaacaattagtgtttgcactttggaaacaccctagagaaatttcaggcataaaaacaaaaagaggggaagtggagcaggaggatagctttggggactaaaagaggcaaagaatgaaagaaaaataaggagtcaattttcacttttgatagctagattacagtcctttgaatgcgatagtccacaatgataaagctttatgaacctcaggatttactaaaactatggctttctatctcatagcaaaaaaaggtagaaaacccaccatccaacctaggaactcaacctctaccagttaacttcccccagcatttacacttacttccaggattacatcattctgatttcagaagttggatagaccaaggctgagtttcagtgtctgtggggtctgctgacttatggttcatccttattcctaatgtgagtccttcacaggccctcccatccttagccaatccctgtcccctcagaagacaaagccctcataaccatcactcagcctctcaacacaccccttacccctactccaggaacagtaaatgccctcaggagaaaaacagccccaaacaacaggatcacattcctgaccttacaatttctcctagatcttggcctgatatccttcatcatcttgtatactttgatgccttcaagtgtgtagctatacatatattttaaattcagctttcctagttgtcttcattgggagaggtggttaaaatcgtctagaccttcattagtggatgtggaagtcttttattatccccattgcaaatatgaggcacagagaagttgggtaacttactcaagttcacaccgctggcaagtggcagatcccagagtcttcctgggatccaaccccaggaagactcgttctagtgtttgtgttctcaaacatctgctccttgctagggtaatatatgttgctttctgatgatacaagaacaaatcttggaaaatcctgaggaatatatttctaacattttggcatttctcccaaagatttagtaaaatagtccagggaatgcctcacaatcaaaatattcaaaggaccagctaagaactagaaactctctctgtgtctgtcaacagtggaaggtataagcaacacattgaatatttatacaatgaaatactacacactaataaaaagaattgaactactgacacatgcaagatggatgaacctaaaatacactattttgagggaaaaaaagtgcctaattcttttgtgttatgtgttacatgcttatttttcctttaatttaaaacttctatttaacagttttatccaaaggatttaggcaagtctcaccttgctatctgataaacagtttccttgtgtgatttgtaactttgaattacaagtttattttaagtgagacttcatctatgggaatctttaagccagactgagggtgttttcaacagcagctctgtgcttgcttctgctagtatatccaccccgccgccccaccatgtacacatcccgccgaccccattagcctttttatgagaattgttttggtttaggtccttttgagactatgaagctactgtaaattcaaactccaagttgtgtaaggtcagaccattgattgtgatttcttagggaagtctattatttttcaacacatagaccaggccaagacagaaaaggtttcttgaagtgtctatgttctagtgagatttttttatttcaccaaggatgtagctgggaattttatgtttcagttccagctttctaacttggctatagtcaaggcttttgcatcctatacctacacggacaataaaacatactctctctggttacctaagggagcagctgctctctccaccaccactggtggcagttccaatatcaggtcatatttattgacctcttggtttttggctttgtgaatttttcttactctcttttgagctcagttctatctttaaaaagatactggttatattttagccagcatttctagtttttgtagtgggatggttttcaaataatgtatttcacaatatcacttttcaagtaagtttggaaatgctagaaactaaacttatccttggagattcacatgattagccttttaaaggtcaggcaccaccaagcccggctaatttttgtatcccttgtagagacggagtttcgtcatgctgcccaggctggtcttgaactcctgaactcaaacaatccacccacctcagccttccaaagtgctgggatcacagggctgagccactgtgcccagcctactgattgggatatcaaagatattgaaatgagaaaaagctcatgcaaagattagtaagaaactgtgcctccatccctccctcaaaaaaaagaaaatgagggcaagaatctaccatgacattctctttgagatacatgctatcttctgtttccatacatgctgcttacagtttggttgtgtgtgcctaaggggtcccacaccacctcagcctccacagcccctaattagccctcctggtcacacataccatctacaccctcaacctaggtcaggttcctttttataaactcatatagcatttgttaactttttcacttgtaactcttttcctgctaatattcaccttcccaagtaaaatacaaactccatgaaatgacaattctcagtttgaaaactctggtaccttgaagagccacagtggtcaagtccagcaggaagacctccagcactggggccatatgtactctgccctctcctgccatatgtgcattcatactatgtcccaggagcttactctatagaaggtcctaggctcacaaaggtgggcaagaaaaagtcactgtggcaagagattgctagctctcaagttccctttgttcttaagcacacagcaagattacacatcctagtcttcctttaagttaggtatgaccctgtgactaagtcctctcacaggaaatgtgaacataaatgatgcacgtgtggcagcctcgctttaaaatctctcagcaatgttcctccatctcttactcctctgactgactgggatggaaatgatcacagccaccttagcagccacgtttttttggttgtttgttttgagatggagtctcgcactgttgccaaggctggagtgcaaaggcatgatctcggctcactgtaatctctgcctcccgagttcaattaattctcctgcctcagcctcctgagtagctgggattatacgcacctgccattacgcctggcttatttttgtatttttagtagagacagggtttcgccatgttactaaggctggtctcaaactcttgatctcaggtgatccacctccctcggcctcccaaagtgctgggattacaggcgtgagccaccatgcccggcccagcagccacatgttaaacagcaaagcctcccttgaccttgaggcccagaaaaacctgcatgggacagagcctgcctgggatgcctggcctgggctatgtgaatcagtaatacaattcttgttcttaaagcccccgagatttgcgggtctgttagcacaggctggactgtcgtaatacagttatcaatctcaagaagctcacatgttccaagaaagaatttctattactgtgaaatatgttccaaagagcattcaagactagagcaaagcagggggttaaatttgtaattcagtgttgttggcttgaaagctgcattttgctataggcaaggatgaataaccaaagtcatctaggcagacagcacgacagacatttttctctgtataggcaaataagcattctgagccagtatctctgagggagggccttggtggtatgcaggtttagtaactgtcttctcactacacacatcccccaccatcttccaaaagacaaaaatccaatctccattgtttcagtctctgagggtgtttcaaggacccaccttaccaccttgatgcttttccactatagtggtggggagagttaggtgtagaagggagttttctgaaagccccaaagacaagaccaatccacagtgtcttgggggattagtagcatcccttgccatctggctaccccaagacctcaggacagagggagaccccagaggtttctgatggcaacacactggctggaagagccttggatctttggaccctgccttggttttgtgcactttccagagcaactaaagggcacatggtctgagtttcaccgagtcaggaagggagaaagagagagaatgaatgaacagactagatggaggatggacacgaaggaaaattttttttaacaaattaatattttttgctgcctaggcaaatggcttttgtgaaaacacttgtatgaaaagcaatacaccatttgtttttacttaccaatcactatcattaggttttgatgcaaatgggaatttacaataaaatgaaacaaataggatcagggattatatacaatactgtgatcaagtgatttgtgattcaggcaatgtactacttgaaacacatatctggatttctcattccaattgctgcagatgctatttgaggaagcaaagaatacagaaagaaaaataattaggttcattaggctaagactaataccagtaatataaacaacaaatttataacatattgcattgcaaataagcaatgtttttagtataaaaattgcatttccacaaagaagctaataacaaatacgattaaaccacttcagaaacacgtcaaagttgtacgagtcacacatatacagtgtcacagtctacataaagctttactgagaataagccatctgaagggcatgtcccgggctgaagcgatcaaagggcttttcaactgaagttcttacttccagaaagctgttcaaaaagctgccccatcaggttcagcaggcttgatgactccaaatttggctttttaagacaagctaaaatctcctccagagaatcaaaatgtaggactgaggtaaagagatattaaacaagaaggaacttttctgttggcataagagatttgaatgaattctttcgaaaatgttggtacatttgacaggatgggtcaaccacatattcataatactgacagaaataacactgtaacaccaagatgagggacacagataacctattgatacgagcaacagaaccagcctccctcttctttctctcacttcatactaaagattttatgctgaaatctcaggtttgccgtaacttttccacctttttttaaaatttatttttctctggacttctaatgtttccatcctatgaaacaacataccagctccactactgatgcatttggtaataaaaagtcacatggtaagtatttgccttaaaaatgacttttatcgtctaccccaaaggtgtttttacaggatgcaggttctgtagactgacatattcccaaatcatattagaacatcacagctgtcaacaaggaattttggccataaaaagtcaaattttgttttttttccactatcaaaagccaactcagctgaagcttatctattttctactacagtagttattttgaatgtatagagctaaagaggcctgtggctaacagacagggattccatgcacaagagcttttaagtatgtgcccatgcagtgcaaggccctgtgaacccaacaggccctgtccctcatcccatccaatgactatacttcaaagggaaagaaagatgtggattgcctgtatgttgcttcaatatgagatctctgagcaagctgggttggtttagcagatctagcaagagacaaataataagagaaaccaacataaaggtaatcagaagtttcaaactttccttctaattgatgaaaagataccctgctccaactccccaaacataaagcactgcacattcccattccaaaaccagttacctgcattgcattcacctaattttaatttacataaaataccattctgtgactaaataactgatactgcaatagagggaagcatgattttaattttttttttttttagattttaaaaatcaaaatcatgtttccatgcacttgagttccggatcaaatatattatctacagaaaaaatccacaaactcttatcgaaatgttcatataaagtttaaattatttcaggttggcttttctcctttagttttatattcattaagtattgaaaacaaacctaaaatcttcaagtggaaagatattaaattaaattttgttggaaaaaaacccatctttgccatgatgttaaaaaagggaaaatcaggaaaaatggttcccacagatatttaaagttttaatgggtcctcttctccaagatgtttttctcctcacccttcaattttttttaaaagtatttctgagaaagaaagtacattttctgccaggtacggtggctcacacctgtaatcccagcacgttgggaggctgaggcgggcggatcacctgaggtcaggagttcaagaccagtctgaccaacatggcgaaaccccgtctctactaaaaatacaaaattagccaggcatggtggcacatgcctgtaatcccagctacctgggaggctgaggcaggagaatcccttgaactagggaggcggaggttgtagtaagccaagattgtgccattgcagcctgggcgacaacaagagtgaaactccatctcaaaaaaaaaaaaaaaagaaaatacatttttcttattatataattagatataggtcaaatatcccttatccaaaatgtgtgggaccagaagtgtttcaaatgtttttggatttggggatttttgtatatatataatgaggtatcttgggagtagacccaagtctaaacacaaaattcatttgttttatatacaccttatacaacatagcttgaaggtaattttatccaatatttttaataatcttgggcatggaacaaagttttgattgcactgtaactgccacctgtcaaatgaggtcaggtgtaaaattttccacttctgacggaatgctggaactcaaagtttaagattttggagcatttggggttttggattgttggaacggaatgttcaacctgtactatttggggtccggttggaaattggctttacatttttaaaagccagtgtagactgtatttctgccttaccttctctctagtcaaatactccactaaaaaaatgaatatttcagtttgagagggaggaattatatagaaaagccaaactatgaaaccattcttattccataatacctctgaacctgagtttactgttctttgagaactctgtttcagctgattataagagaaagaaatccagtgacacgagggcaggcaggccccgctctgctctgatcgagaaaagcttcctgatgtcagggagatggaactgccaccatcagaaccatggcactttgggtgaaggtgtgtcagcgaccaagggggcaggaaatgggcagtgactaagggggcaggaaacaggcaggcacatggcaaggttctcccagcccatcagcccagtgatggcctcgattttgaagctgcactactgtctgaaaagcacaattactggtgactcttaacaaacttcagcatactggggaaggagactgtcaagtaactgaattggaaagatgaaaaagaaccatctctaaaagttgatgctgtcagaagaataacctcctttgtgcaagtcttgcaacatcttcattcaaccacaggagggcagagagtttcagaacctcccccaccagtgagctccgtgctcacaattaatacaaggaaagggttatctaaacagccagatagaaatatactgcacgttcctttttaaagacgacagaaacttttagaatttcataaacctgtactcattattctgtctggatctaaggagcatagaatcaactttaggcatctttcgtatgcttggaatcgaatttcatgaatttattctaacacataaatcaggtaagagagaagtagatggatagattttttttttttaaggaaattagcctccctgggtacttacagtagattgagtattgagagatttacaaagatataattctttggaagattacagaagatggaaacaaaatcaaatctttcactttcaggtactggagttcattaattctttcaccaaaagcacatcactgaaggaaaatcagaagtggttttttagttattattaaagtagttcaagacccagggaaccccttgagatgaaaacaaaacagtattcaacttttcttcacaagactaccttgtactggcaagacttagaggacttctggcttgaaaaatattgcttagaaaacttaaaaaaaaatcaacaacaactatattttggacaaaacaatttttttttaatctgtcttgtaaaatccttacttccttttgagtctctgatggccacaacatttcatttgagatgtttggcagtcacagcttcaggggttatggttactgattatctaaaccccttaggtcagaatgaacaaacacagttcatgtaaacctggctgttattggagtcctctgaccaagagataatagtgaagagtgtggagagcctgaatgcccatggtggaaatgctggaaaaattaaaggtaagaaataaaacatagcacaggagattcagagggctgggatgacttctgagctgctctctatacccaaggccctttcaatttctagctgtgaaagatttttcatgcactgtggtgcctgatgtttcctgcaatttgacaaaaataaatactttacacaagaaaaggatgcaaggcttctacgttacactttggggatgctcaggagccaaggctcctgcttggctttcatttcacagggcctgcagccttgtctctggaaggtgctgattaggactgggaatggcctcctctggtcgagactctctgacccctaagtaaatgaacttgttcccatcccagtctccaaacagatcccaacactacgtttgtttttctatatcctgattgtcacacctggaagactctccttagtatacatgaggcttactgccatgagaccaaatgactagagagcatcttttaagagaagcttgctcattcaggaaaaattaaggatttggtacaaactgcaggccaaagggaagctgacatattgttttggtgtgtattcttgaaaacgcatcattaaatctacagtcccttgtcagcatgctgacttttacgctgcctcaaggagtcttccaccacctctgtgtcagctgggcagggttgctcagagatgccttcttcagcctcctcaggctctacttcctcccgggtcacaccgtcctctcctgggggcccctgatcattggcctcacttctctcctcatccacaccagcagccaagttgtcctcctcctcttcttcctctgcttcatcctcatcgccaagatcttctttctcttcttcatcatctacaaggctgtctttgttttcttcttcatttgaatcatctttttcctcctccgcatcctgcaactgttcagctctatgagcctcctctgatctccgattctgctctatggagggaagaaagaggaatatcctctgaataaacaatggtaattcggtaatcaattgagtgtgtttagctgtgaaataaaaatagagggtaagtgacagttttttctatcttgaaactatggtcatataggacagattctctggttggcatcctagccccatttagggcttctccacctgtctctggagatttcatggaccataatgacttcagcagggcatgtgggcagcaagggcaaagggtcctttacgctcggtattttgtgtcttgtagaaagctcagtgaccctattggtcatggtgattggttcagaaatgtgacatgctaagccactcaaagtactccacagaggttctgggccagagtcaggagaaacagcctctttttcttcagggatttttaaacagagaaaatgcgcaaggactatcaacagctcttatgaataagccacacagacagagaaacctaacatcacttgggccgtgcttgaagctagaatgtccctgggcttttcagttatgtgagctaataaattttcatttgttttcctaaaatccttgatattgggtttctattacttttaagaaatctaagaatcatattttcaaattatcaatggaagtctcaaagcctcaaaaacttcaagaactaaaaagaaacatgagcttatttaaactcccacataaaattcaacaattagaaagtctcatgaacatctttatgcagtctcaaaaatagtctggaataaagacatgcaaatccagaggcacctggccccagaagaagtgtggagcagtgcaaggatttgggaagactgcttttaaaggacttagaagagttactagcacacagcagaagcaatatatattgagtttcccttcttcccttctagttctagttagaataaaggaaaatatgacactgattaatgaagagcacatacttaaaaagaaaaagcaattgccaaaatgaaatatttcctaatttaagaaagggagaaaaataattttgttcaaatctacctagaaaacacattttaagaaatttggtagtgattatttggtcacctagtaaatcacagagaaaacccactatctatatgagcacaaaaaggcacatcacagaattccaaaaacactctagatcacaggagcttatcgtacttaccagaacgctcagataaatgccttggaagtggcacatagaaacattctgatattaccaccaagacctggaaggaaaaaagtgattttacagtgaatagataggacatttattaccaaaggacctcaaaattaggccttgcttctataatcagatattcttagactaataattagcagctagtcaaaagtcttcacaagagacaaggatataattaagaatttcctacttttcaaatgtgacataatacaggaaaatattaatttagaaagtggtcacaaagccaaaagtctacagagaacccactataaatagatgaaccaagcaggtataagaagatagacactatgaaccaagtctttttaaatacactattctggacaaccaaaccactctgtatataggctgcccctcaccaacgggtaacccctgattgaatggaagaacatttcacaaatgttacagccagctgtgggtggggaaggattgaggatgactttgaaggaggaggcatttaatgccctgggcagtcaggagagaacagcagcaccgcctggctgctctaagctaaactaagttggatctccatgggggtcttggatccagagaaagccctgaatgtcaaactgaggagacccaggaggtggggcaatgagttgcaggaaggcttggtgggttggagaacaataagctctaagccattaaatcaatttgaacaacaaagagaaaaaaaaacattccatctgaaatgattcaggtttgaaaaccttaccttttaatgtgatagttatatgcttactggctattctaggacataatgtttctttctgacttttcttttttatttataattgacacacagtaactatatatactgatggggtacaatgtgatgtttcaatgcatgtattacagtataatgatcaaatcagtgtaattaccatatccatcatcttaatttatcctactcttctattctggaaaattgtacactcaacaattttatctcaggtttagtctatctaatttactcatttaattttgactcagttggtgagattacaaaaaaaaaaaatttggatcctagcttcccaacagacatgtcatccttcaaggagtctgggccattcagagccagcctcaggcagctttgtcccccagtattcctttaccctggcatgctacgtaaatattctctatgtggctaagacatgaaaacaattgacaaacacttttctatcatcctagaagttaacaaaaatgtcattctggaataggtgatttaaattgggataagaatgcagctgtttcaaattgtgtaactctcacaaaacagaagttgaaagtacataagaaattaaaggttactaaaagcaaaaattctagcagttgtgtgtttactttaatatacttaacagttatagaaaaggcattctgtgtgtgtgtgtatatatatgtgtgtgtgtgtatatatatatatatatatattttttttttttttgagacagggtctagctctgtcacccaggctggagtacagtggcaagattatggctcacagcagcctcgaactcctgggctcaagtgatcctcccacctcagcctcccgagtagctgggactacaggtgtgtgccaccatgccaggctaatttttgtatttttgtagagacagggttttaccatgttgccaaggctggtctcaaactcctgggctcaaatgatccacctgcctcagcctcccagagtgccaggattacaggcctgagccactgtgcccagcctaaaacaggtactttgaacacagatatgtgtttgttattttttggaaacttattaacagtaaatgtatgaatcttttataatttatgattcatatgctttgaaattattatttcgttaataaagttaataatattttgttaaataaagttattttcttattaaggaagggtagtctatctcacttaatcacttgaacaggctagaatcactctctcctttcttcaggccaagcctccaataacctttctacactgattatctgaatctaggtttccaaaggaatctaaggcataggcaggcaggcctgactcaatttcatggacttaaagtcaacatcaaaaataatattctaaaactctaagcattttcactagtcttccaacagggtcacacacaacctacattccctataactccatcattgactcgcctgggacctcatactgtttccccctacaagaacctcacactatggtagccccaaaatacactgctagaaaaatctcgcaccagacaacagatgggagaagcacagacaatcacattctatttatatccggtgtcaaatccctttagacgggagcaatggggacatgttaattagcaaaaagattaatgcaacagaacagaacatacccaggacctaatgaaggacatatacagatatctaagtaagtcccattcttatccctgaagttaacatcaggagccaagtttcaaagataagccatgatatgtattaagcatgttcatagaaaagtcaaatcgagcctccttggcctcttggggttgtgacttactataagtcaattgttaacatttttaaaaagaacttgctaaagagccaaaattcattataaaatataaggacagactttaagataatcttaccttaaagtctgttctttgacataaatttttagtaatcatcaattattcccattatagtgtttaggaactatgtgtttagtatacaatataaaggtttttaaaaactttttggtttaattagggtttaaaatgcaatcaaactaatcaagattaggttaagagaaataaaaaataacaagaagtacaacatgctgaacatttatagttgcctatgtagttagataaataaatttattattcaactcttgcctgaaatacctggggagaaaatacctggggagatatatactgcatactgattttcatgcccaaagaataattgtgttgtgttaactacattatctatctcaggaaaaccagagtgtatgcataagcggctagtcaggattagtttaactggaggataagaacaacaacaacaacaatcttgcatctacacaaggaacaaattcaaaaccttggccttatcactacagtgtttctaattaagcaggcaatgtgtgaaatcacagctgactcagttgtcttagaaactatcaattctagtaaggtctctttttttttttttttttaattactgtctataggcagtacacatcttcaaaatacttaagggataggattaggggataagaatttaataaattttctgttatatctcacattaccattgaaagcagtctcaaacaagcaaatgctatttaactacttagattgcacaaaatactattttttatgtgctttttctttcttggctgccttttatttgtacatgaaattcattttgccttaaagatagaaaaagtttggtattatctcttaccagacccataaaaaggccaaaaaccaaggtggctatgacgaaaaagacataagaacaccaagcaggaattccaagagtcactgtgaaatagttgtgaagatgctggaatcagaagaaaaaaaataaaacattaatttttaagagaaccaaaaatatttcaatctctctctctagctgttgtttctacatacataggttcccacaaagctttatgtatctaaatgattcttaaagaacaagtcaattttataatattgggaaactgagagtagtaattaaggtcattactaaaaaaaaagttatacttgcttagagttcataatctggatagaattctggtagaatcgttttgatagtcctttcttccatcatgatggatgcttttggccctcctcccctaataattatatacatctcaatgtttacttataatagggcattcatgaaaaaattaaactttttgggcctctgactttttagtaaaactaaattacgacttacagaacgtcaatcatttaaaatgtctccatacctctttttcctaattagactctcattgctctacacctattcatcctttcaaagtttggtaaattaccagaaaacataaaatgtaacagtagacagaagaaagtttttctgattaatttattatgagcaaatgagattccagcagtctttgaatagagtgtatatcccttcatgcttactgttccctaagactctatttgatgacaaacactctaaaaatgagtgaagggacataatcacagctagaaagtatttacatgctaaatcataaagaaattaacagatatgaacttgctatttcaaagtcaaaacctacttagatgtagagttgcaggagccatgcttcctcacaatcacttagtcatttgttcaagaccctgacagcttcaaaaatggccattaaaattcaagtaactactggacacaggatgatatggctccaaatatcatcagcaagagaggtaatgacaatgacttccctagaaccagtaaggttgatgaaaatgagtccaagtttctattttaatttcctatttctcaaaatctaaatcactcccattggtttcttagtttatgtcaatgcaattaaaaaacatattttattctggcttaatttggaatgataaataaagaacaaagcttgtaaactgatttagcaaaatctgaaatatctctctacaatttcttattcagcagaagagatagagctaaagacgcagcaagtagtttaaacactgacacatggaatcaaagtgttcaatcagtatttgttgaataaggaaaagatgcatcaaatgcctgagctatttattcatacgaaaggcaaacacactctcaaactgtaaagctggcatctgtcctctgttgatggcactggtcatcagtgtgtgtttagccaggacaactgtttattaagagtaacttggctggacacggtgactcatgcctgtaatcccagcactttgggaggccgaggcgggcagatcacgaagtcaggagttcgagaccagcctgaccaacatggtgaaaccctgtttctactaaaaatacaaaaatcagctgggcgtagtggcaagcgcctataatcctagctactcaggggattgaggcaggagaattgcttgaaccccggaggcagagggagtgggctgagattgcgccactgcactccagcctgggtgacagggcaagactccgtctcaagaaaaaaaaaaaaaaagtaacttagcattttacaactcagcaagcaaaaggcgtgtttgagatatcaaaacatcatttcattcaaactcttttcaaagaaagttttaaaatttactgtatagtttcctactttagaaaatactgtgtattaagcttatgcttttctcggaggactcagtatcatcaatattaaacccggaaatgtgccaaagaattagaagatggtcaaagtcaatctgcctctgtgtcaacccatgaatgtattttagaacttgctttataagtatctgctgatttatcttactcatatggttaggaaaaataatgtgcagttttaagtccttctatacagtatctcatgccctttctgcaaaataaatgattaatgcaactctcaagaaactttctaaattatttttaaatttcattaaatcatttgcttttgaagcattgcattctgactcaaacacttagtactttcaaaacatcctcttattttaataagctgcacttcaattttcttgtatcaatttcctctttaacggaatttgagtttcttggagaaactctgccatcttctggtcttttaggtcattattagtaactattcattaatcaggttgtactttcacaactacagatataaatatttatctgtctactttgtctgagtctacaacagctttaaagccccttatgagtgttaggattagtggtaccatgtccttgaagttttgctttatatatgtttccaaaggaatagcttattaaataaaatccaattcagttttagatcattgtgtttctgtttctttaactaccaggcaaagtgacagttttcacttgtggaaaatactgatccttattcaatattatatgtgcttaccacaaggaaatatcccatgctgttcgctgaaaatgcacaaaaatgtaaactgatgggcatgataccttatactatggtactagatgaataagaaagtatcttactcgggctgggcgcggtggctcacacctgtaatcccagcactttggaaggccgaggcgggtgaatcacgaggtcaggagttcgagaccagcctggccaatatggtgaaaccctgtctctaacaaaaatacaaaaattagtggggcttggtggcaggcgcctgtagtcccagctatttgggagactggggcaggagaattgcttgaacacggtaggcggaggttgcagtgagctgagatcgccccactgcactccagcctgggtgacacagtgagactctgcctcaaaaaaaaaaaaaatcttagtctgttcactgaaaatgcactaaaatgtcatctgatgggtgtgacaccttatactatcatagtacatgattaagttagagctaacttttggctacatacatatttgagtgagaagatgaaattaaaacatcattacaacagaataaatgagaagagcattctaatcagtggtcagacagacttaaggaagacagccaagccaaggcctccatgcatctgaggtagagccttccctccccagaaaggcaagcactccctctggaagtctaaactactgcaggttggattaaatactacttagtcacacccactcatccagcccagtgttgcagagtctcattcaaacctagactggccctgaaggacagagagcctttggatttagagttcacctgtgtcataggatatactctctgaggagttctggaacaagccctttatctctttcagacacagatcagaatccccaaaatatcttccctgcaaggaaacagctagaaaagactcttcaatgatggccaagggttcacctctttcatgctttagctcttagcacttgtaacaaaacataaccttgcagcctcttgtaggatctatgaaaggtaccttacagatgtgcaccactgtctcactataacattctacaaaacattctaaacatttttatacgaaaaaaacattgagaagaggcatgctatgtaaatcacagaagaatgttttcaagttttaaaatacactttgttcttctctagtctaaatgttcatggcttttaattctcatcatcagatattttaaataaagccttaagttttctgtcacgtcattctaataaaaagggaaggtagcatccatcacacagattgtcctcccaaggatgtagcacatcttattttagctaaaatctgccatatgcctacatcctctcaaaacgacagtaacatttaggaaagggaagttacatcctatattatcagtgagcagcagagattcaacaaatccaataaaaaatgctttaaatacatttaaatgctaaacttagttcgcaaaagcatatacaggttgagtatcccttattccaaatgcttgggaccagacagccttcagatttctgattttttcagatttttgcattacacttaccaggtgaacatcacaaatccaaaaatcggaaattcaaaatgctccagtgagcacttcctttaagtgtcacgttggtgctcaaacagtttcagattatggagcattttggattttggatttttggatttggggatgctcaacctatatgctgagcaactgccacggaaccctattttaagcctgctatcagcattggctaaaaaaattaacaaaagttaaagtattccacgttggctataaagagaaggaaaaagtaaaataatgaagacaataatgattaatacatataactaacaaaaagcaattatcaagcacattaactaggtaccagattctgcactaggcactcaaagggttctaggaacaagtctatggctggaaaaaaaaaaaataggattcaggggcctacacataaggtgtgaaacaatgatgtgtttctggaagagaaggatagtgccactctgtagcactgtagccaactgtgaaaagagggaagacagaagactggacagtctctctccacacatgtgccacacacaaaacccaagaacttctaatcctaactatgccaccagacttggcagtgatgcttcctgaagttcaatcttctgcacattgcttttatgatattcacctcaccttgtactatccattagagtattaacatttttcatttagtcactaagttgcatacaattttaaagaaattggatattgctactataatataaaatcaaaatcaattttgtcctttgaagatgtcaactctctgagaaactcctctaactgtcccatctcctaggcctcagtgactccatctgtgagatgggtaaaatgttgagactatttgtgaggatagatattaacagctaatgaggtaattacttctgtgagtttatataaaaattaaaatatgcaggtgagcgccatcatgagtgaattggaaagaaaatttaaatttagtgatggaaagaacactggagatcatctactcttgtccatattgtggtatgaatgacatatcgaggatccctgggattcagggtaacagcaggaagctgacaggaactgcctcataagactattcaagggactttctcacctcaacagtttactcaagcaagaacataggggaggttggtatgaagttaagaaggccaaatgcaaaccaaaccaactcctgagttgataggaattcggccatgtgagtgtctcatcaccaggtgatcctagaatcttgaggaccagcttttatctccagaatgtgcaacctagcaagttggcttcacttctaaggcagaaagaaacccaagccccttaaggaatcactaattcagtaggcgctgatcttctagatatatctctgatcttctagatatcttctagataattactagctcaataggctctgatctaaatatattgttttcattttttcattacagaagaaaatagaagttatagaaaaaacgtttttaaaaatcacccatatcagagaaaactactgttgatctctaagcattttcctatatacacacaaaaacgccatataaacatccattatactgttttgtcatcttccctgcagatatacttacatctaaccagctacccatccagggaagactgttgctgaggaaagactgatttctatctgtacatgtatccagatatttcagtaagataaagagactatggataggcataaacaatcttgtctcactggcattagccattctacgtctttccttcttccatctttataatcttctttctctgagactttacacttttttggttccaccttccatccctagtctatttctgtctcaccatgtacagttgtttcttctgttcattattaatatatttgcattgtagtttcatatgatctagacatgagttaaaaaacaaatacgtttgccacaattatacattcaacatggatttgaggaactctgactaaaggaagagtcagctaaatgagctaactgagcaggcagggcagtcagctggaaggactcgctgagtaagtggctctataaagacaggaaggcaagaccataactaaaggtgggagtggggaccagagacctgatgggtagccaaggactgggtctctttaggtcagagatggtgtgccttataaatcagaggacaagggccacattctagaaacacaggtggcaagagacctacctacagatctgatgaaaggatggggacttatttctaagaataaatcacaaaagttggcaagaggcttggggaggctacatgctgatatggagggcagtatcagatttcacaaattattaaggtaatgcacacacacacacacacacggagatcaaaataacactgtatcatttgcgttcttttatgtgcaactctcttccattcccctacatacacacaccctacaatcaggacaaatgttttagtgatcccaataaatataaatggattaaattcatcagttaaaagaattatatcttgctatatactttttataagatttatttaaaacataatcaaaaggttgaaaatagaaaaattactccatgcaaatgcttataaaaaagaaaacacatggtattaatactagataaaactattttacaattatacatttatataattgtacattttgcattctacattttacaattataaaatgtaattacttgtgtgccaaattttagtttatcttataaaatgatcatttttggttccttttggaaatatctggaaattataaatatacatttatataacatatatattctacttctcaatcattaagaaaaacatattcattagttattcagacatggatcacattctgttctccaaacggctctttctctccagtttaatgcatccacacagaatacatctgtgttgcccatagctgggcactgtgtgtacaaagataaaacacccactcctggccttgacacactctaaatgttacacattgtaatcatctgcatgacataatgaaaaactgtaactccttatttaaacttgtttgtctaagctccaaattacaagctatatgaggtcagggccattatgtatcttccctgctatcgtctttgaaagtaaaacttctcttttacagtcaatgaaggccataatcagcttccatctaagctcttcttaacctgcagaacaaattctattgcacttatcataggtttggtgctaaaatttcacagtcaatgctgcctgacaaccatctactccaatttttctgttgaattagacagtataatgctacacggctcaaacagccatcaggctacatgattttgtcagtctttaatatcaacatactgcaaaaggcagaatctcttttcaattcccagtttgcaattcataattcttagcccttgattaaagttctcaccaatgttaagaaagcagcagaaggaaaccacatgaaattcaaactatctggagagggggaaatattagttattgtttattgtgagacaaatgccaaaaaaagttaaattttaacctgaaagactgaaaccaagtcttcaattcgcctctgttgtaaaaaataaacaaccaaaaaaccttgtggtaggtattctatctcacaaggcagaatataaatggaactgagaaagtggaatacaaaaggtttttcttaaatgtctttcaacatatatgaatgtgtatgagaaacagaaaaagagtcttcacaaactctttgaatattatgttccaaacatgacaccataacctacaatcatagcatagaaaagacatatatagggagactcgcttctaagactttttgaaatattttgagctatatttaattccagagccattttgttcaatctggttggatttagtcctcccctacagagaagggaaataaaaggttatgggacatactcaacattatataatggttcaaaaattaaacctgaataacagttctaacccactgaaatgactcagagaaattatacgatcacatatagcaggggtctactacttaaaggccagattgtaaatattacaggcttgtgaaccacaattctctgtgtctgtcacaactattcaactgtaccattgtagcatgaaagcagtcatagacaataggtaatgaataaatgtagctgtcttccagtaaaattttatttacaaaaacaggtagcccatccacaggctagagtttgttaatccctgacatacagaactactttcagtcttagacaatctttcctttgtagggagatatgcctacaaagaaatacataagataaagtaaaatcacataagccgttttgcttggatgaaagacttcaccactgatttaagaaaataagacctcgacacagtagttacaggttactgttcagattatgcccttctacatgacgacattaccactggaaaccccacatgagagtagttgcatggcttaagaaaaaaagtgaaattataaatgtacttataaatgtttgttttcctattgcttaaaagctgtatttttattcttaacctctctgcaaatataaacgttttatttaagattacttacccatatcttgccagagatgctaaaaagaccagccattccagacatccttaaaaaaaaataaagagaagaaacagtgatcatatatactataaaaaaaaaatgaaaatcaggtcaggaggactggtctatttccctccacttcttgctaaatattgccccctctcccagattcatatctgttcttacagagcttagattcagtggctatcatttgaatcactctgctgtaaatctattccaactccttggccctttctcctttcattgtgcctacccggcaaaaatctcaacactgagcagctgaatgtctccagggaaaaaacatcacataaccagatgacagttctttctgcttcatagtcccaaacctaagtggacacgtaatactgtccagcactttctaagctctaagaaaatagctcatttccttttccttctcttcaaaacgtacacatcttcccatccccatgtactcagctaacaagcactcctcatatgtcactgtgaaatcagaagccaccatgtgctttctctcatcttcccactaccaaatctgagcctggtgtccacctgcatccaccttctcttgttatgacaggaaaagtctaactctcttatcacagtccaattcctccacttgtgccttggatcctatccattttgtcttattaggacttggttctttctctcatcctcccttcctgcacgagcaacttctctctctctcctagaacagtctcactggcatatgaacatgctctactctcttttaccctttaaaaagagtatccctggacctcacatgaccctccagcttcacagataaatttctccagattactctacacatgctgtttcttctctactgtacctttaatcgattaaaatctggcttccaccctcaccactacaggaacagattgtcaaggccatgatgacctcaccatgtttcattcaatgtccatgtctcagacctgatctcccttcgcctcttagtaacatgggatacaagagactacgcccttcttcttgaacactcatttggcttctggaaaatggcagaccttggttttcatgttgcctctctggtactcattttcagtttcctttggctgacttctcaacacagtttcttaatttgggggtggcccatgactcatccccaagtactcttctctttttccttctttctaggtgttcccctcacctcaacattgtctgtaggtttttttgtgttcctgaattcttcatggggacccatttccatgcatctgatatgctttgaatctgtatccccacccaaatcgtatgttcaatttgtgagatatgataaggtttcccttcaaatagcctaatcaatcttttaattcagagttaaccaccccctctttttttcctttttcctttctgcctttgttaaatgcgcaggcatgccacaataccagccattatcagtaccaactcacattcctttccttatttaaaaaaaaaaaaacaactttctgactcactacagacaccctttcccctttcctctttcttctatgtgcccaccttatctaaaaaaattcaaatgtttagccaactaaaattagtttatacacctgaccccagccaataaaaaaaggatacaggggcaagacttgcgtcaaaaataaaggctctcgtactcctttgttcaagtgtgctctcatggcgactggccaaaaaggcacctctctgcgcaaaaataaaattgctttgctaaatatcctttgttcaagtgttcaatttcttaaaattgtaagcattattcctaacaaattgtaatccctaatgctggaggtggggtctggtggaaagagagtggatcatgggggcggattctcatgaatagtttagcaccatccacttggtgctattctcttgataatgagtgatctctcaggagatttggttgtttaacagtgtgtggcacctccatccttctctcttgctcctactctggccatgtgatgttatgtgcttccccttcgccttccaccatgattataagtttcctgaagcctccccagaagccaagcagatgccagcatcatccttcctgtacagcctgtagaaccatgagccaattaaacatcttttctttataaattacccagtctcaagtattcctttatagcaatgcaagaatggactaatacagcatccactgtgacagttctacaaagtctgcatctcaaacccaacaagatttatacagaatccttaattttctcttgcccaaggcaataacaagtaccaagatccatcatgtactcaaaccagaaacttgtaagtttttattaatgaatccttcttctccttcaccttggccaagcctaccttcataacatatttaaaatccactcagcctctccatccccacatccccactgctgccacctgacacaagctaccactctaagcctcaactcacttcatccattcttgccctctccaatctcctctcctaagggtcaccttctccttgtgtgtgctgatcacttccaacttctttcctgtggccacaggccctgcatgacctggcttcagcctgcccctcttactcagctcatcctacattccctttcactatgcttgaccctggtcaccattctgctccttaagtacaccaagctcctttccaaactggggcttatgcatatgccatacccattcctgggaataatcttccctctgctctttgcctaagctagttccttctatcattcagatctcacctagaggcgtcccttcagagaaatgtctcctactccctccatctagaagagcaggtccataaccccagagctatcccatctttgtaaaatatgttgttgtgttttttatccaccctcatcccaactatgattctctgtacctgaggtgaatgtctgtcttgttcagtgttgaatacctagcacctaggaaagtatctggctaaatcagtgctcaaatggttgtagaatgaaatgtgagagttgtttttagagtaagctatgtgtttccttaatattaatatagatgccactagatgatttactcctgaaatattgcttgatttgctcctttttcagtagggaaatttcttacacttgtatatactaacataaaattatctatatatatgacaatccattcaaaactaaaaccaactgtggaaaaagctgttatggtttggcctaatctacctcaccaagtattatacagtttgccgtcaaggccaaagctatcccctgtggtattttgcgaggcagccaaagactccacaggttttgttttccacataatatataatagcaattccttcataaactataattcaataaacagttattcctctgtctcatcaataacttaaaaggaagaaagaatggtaaatgatgttcaataccatattttgtaaagagaaaaatagtcattgtggcttagtgtaaaagctggaaaagaggcgttctgtaacccactcaaatctggctacttaattcccagtatactaaaaaccagctgaaacatatgtaggtcacaaaatcagaaatactgcatgggctaagcatggccatgagtaatctgggtaattggaagtaaatgtgaagtaaaacataggcttttttgagacccacaggctattaacttaaaacctcctgttttattagtaacaccttgtcttaaaaaattgagttacgttagagaagccggggatttccagccagtcagaggctcgactgattgccatttcttctctaagatataattctgcaggtcttcgaagattcctgggccacgataacggcggaatatcccatcctttgcactataaattatgaaaacaagtagaaagcaaatgcattaaaataacgatgttacagataataaaaattaaaatagctactggtgatacatctgaacgccatctgaactttaaattgactcaattgaaaaatatacatagagataaatcagaaagagttaataagctttactataagtgagaaattcaaacctaaaagcgttaacattctatgttatcaccgtacaaagtgtgactaaaagcagagttcttggcagtgtttaatatgccaagttactttttattatttttgctaccaattactttttctcttacaatagcaaaacagccattgttatcaagtttaaaacattgtatccacattttcaaatttatgtcgttcaaggccctctcctcaaacatcaacaaaaaacgtcataccccccttcaacctggcctccctctcacctacttgcagcaatcagggcccccagggaagagtctaggcttgctgttttctcctctttatgtctcattcactacttggtgcaactgggggttctgctcccaggactcccttgaaaccactcatactgggggtctccaatgacccctaagtgccgtatccatttctgtttccttcacctgttactggcattgttcattcactgctgaataccacttctttcttccttgtgcttggcttttatgacaggagctctctggacttcttcctactgctctgagcattacttctccatttccttcactcactgtcttccttgcagatgtcctaatgttggccaatcccaggttccatccttgacctgcttcccttccccaccatacatgttctctctagatatatttcaacttttacctcaatgctgaggaattctcaatatgtatctccagtctagatctttcttctgaactctggatcctgacatcaaactgtacctagacttctccatttggaactgggaagggcaagtcacacttatcttttgcatttttgtctctatcttccaaacctcctcttattttaatggctcctaatcatgaaggcaggcaatagcttttactagttagttacacatggcctgttggtagtcatcatagactcttccttcccacagctaatcagtcaccaagtcccactgatcctacctcctaagtatctctggaattcactactttctttatctttcccctgcctgtacctgagtctctctggcctcatcactcagcatgatccagctatacctgtggtccagccataaagaactagttcaaagttctcaaaaggtagctcattctctcttgggcttttttatgctatctcctttaactggaaagactttctctaccttgttggcttaatgcattcctacttagatattaagaattaccccacctctgatatcaccagagaaatctctgacttctcctgcccacctacgcctgacattaggacctctgtctctgcagcactccaggaaagcttctcttgtcacagctctcactcagagcacaccagccttgtttccctcacatgttaagctgaatgagtggcagtcatggaagacaacttagaattcctggtacacatctattgatttctaatatttgcaagattagaagattatttaaacttactgaaaaaatgctgggagagtggtgacaaagaagcggccactcaaacctacaagaagcataaacagaacaaaagttacacttaagtcctccaaaaaaagcattcttgagcttactttcataatcacattattaaaatcactgcaattgttgactcacatttactattttttttgacttacagaaatttcatttctacctatttttattacctaacactttctagtaactgacatacaacttgcatcacttggattgtaaggaggctgaaaggataggatttagagtcatgcaaactggggttttgcaaagttaaataccgacttacccatttattaactttataactttagattatttaacctttcttagtctcagtcaccttttttctataaaatgggtatataaaagcctaacttaatggttctaaagttagattagggcaagtgttattaggcttagcatggtgctgggtacatagtgaaggactcaacaaactataggtatgattacatcagttatcagtttaaaaagaataagtaatatgaaatgattaagatcatgtataatgtttgtacatttataaaatctgtaagtaccgtaaagggaatatatgtatgtgaaaaatattttttccaatttgttttagcaaacctttactgaacactaagtacatatcaaatgctatgttatgtgcatgtaaagacaaagataaataaaacccttagtacctcaacaaatatttaccaagcaccttctttgttccagagactgtggttaccactcaagacacatggatgaataaaaacatgtacaacctttattctcacagagcttatagtctagtagcagaaggaaataacttattcaaataatcacaatcacaaccacaaacagagaatgaaaatatttaaaaaaagggtaggtatgcaaaaaaatgctgaatgagactaggagtaaagaacagatccttgccctttaaatgttacaaataaataatatttgcatgggcaccaagaataagtaaagagaatgaaagcttaaggatcctcctggccaacatggaaaaatgacagaggcatcattttaacattttccatcacagctgcctttcccactgtagaacaatgtggacaaaatcaaatatccattcaaattaagttgctcaaatcacacatccctgtggtaacttgcaattcaaaacactgaagctttacttttaataacatggaaaatttactttcacccattttataaattaaatccatattcaacataatttagtaacaaatgatgcgtcttctcaaagaattctgtattttatttcatttcagaccaagtggattccaaaacatctcaattgtatttaaaaggaaacacaatgctctggattagtaaaagtcaaagtcacaaaaagaaacatttactacaaaaatttgtcattgtacattggaaaaaaaagttttgtcaccagtaacataaacacgagtgacccaaaaataggtcaactgaggattgtaacaagcacttctaagcgcattttcatctctcacattgctcaggatttcaccctggagggaacaagggtatcctacagtatacttccaattctaacttgccaggggaaaaagtactgttattcctaaatacttaaaaaactagtatatgcctttggtttaagataattattatgaacagcttcatacattacttcttacctagctatagttccttatgaccagccaaaaattttatctaaagacagttacggtattaagaatgtatatttcatttgtatgtttttttaaaatggaatgaagaaattaaatagtatctcatcacctcttaaagttttttacttagattttatttttatcagaataaagagacaagatttctattaaatgttaggtatcacttaaagtgattttttaacttgctcttttgtatgttcttagtcatcactggctatgacaataaataaagaagtaaataaataagtagaaaaatatttcataaaacacatttaattatacaatatataaaacatttccagattcaggaggctttagtcttaagtcttttagaaattgcacctcatttcagaaaacataaattatctttacaaataaatgtactcatgaaaatcagtgagtaccaagaaaaagtatcaaagtcacagatggtctctgaggtttttctgcatctttctggttctggctaaaaggaataacaggagagttcttcccaaaattgctagattaaagggtataataactttatgtctcttgatatgaattgctatgttgtttcactgactactgtaccaatttacaaggccatcaattaaggtttattaaaataaagaccaataaatcatatcacctcaagattactttcatttatgtttgtcaatatttcttcaaatgacagcctatgtggaatattaacaatgaggttgcagcacccaactcagacacgagttcagtttgctgtctggaataatattctgtcatataatgatatattcagtaaaatcaacaacaacaagatccagaacagtcgaagtcttccttggatgatgacacgctactaaatccctgtagatccaacaccataagaaattcatctcaaaaaaaaaaaaaagtaacttctgggaggctaaaagacatccgaaaactctgggtctcatctcagtactccaaaaatgtcttctaacctttaacactgattctatgacgtgtccaggaaaattttcattacctgaaaattaaaacatgaccacttggaatacagaagcaccatctgaggttgtggcttcagggtttaataacattaagttaaatgtggatcttgacaaagaatttgaacatcataatagcagcttgtctcaggataatagttcagtgcaataacttcagtaagcttggaagaaacaagtatactcctaagcttttcagtaaaaaggataaagttaggccacaaagccttccaaaatttctacatgccttttttactttaagggtaacttccactttaaaatgaagactgtgacacaacataaagtaggcacaaacagagaatgcaggacagattttaacactgtatcagaaaccttatcttaaacacatgcagcaaaagaaagaaaaattaaaagcttagagaaagaaaaaaattatggaagagaattacattttgataagccaaaacacaacagaaattatttaggttcagtattaagaaaacagagatagctaatagctatctattagccattgttgtactatttattagcatgttatctttgtcatgttactaaacctatcctagcctcagttttctgagtaagacagagataaacagtttgttcttcacagggttgttatgaagctaaaatgcatgtaagtgtatagcacaatcacaggctgaagtaaatgcttactaaatgttgttattatcaacaaagagggtagcagaaggaaaacacaatgaaaaaaaggagaattaaccttacttttgagattgaaataaggttgtcaacataatagaaaacaagataaaatttacatttataaaatttaaaatataacactaaagtacagtaaactaaattggcttctgcattaatcagtagttttaaagacaatgcttacacttggctgtggcaggagactggcttacctctaatctagtgaaatagccatcactcaagggtgatgagcagctgctgttttcctgaccttgacaactaagctcatctgcatggaacagaaggttcaagtatatactcattaaatttaatttcccaaagtcaactcaactgacacatcacctgatctacgcagtattaaacaggcaatgtaatgtaacctaatctaagggctgccctttcctcggcttctacatctcagccataaaaatgcaacatgattatagtctctagttttgatgacattggagatgggcagggaagtgctgggaggggaaagatgggcccctggagagggctccaccctcggggctgtgcccatggacctaggcgaggacaggcatttctgtttttgtgcccaaatgttgcatttcccaagaccaccctggcctgccatgctcccatcctgtgcatatataaaccctgagtctctagcaggcacacaaacaagcagctgggagtcaagaggaagacatcggcagaagaacacacagcggctggacatcgagaggacattgagaggagcacaccagcagaagaacacaccagcagacactggcaagtcgacccgcagaacaacggaaagtttggccagggtagttggaggacagcccagccgctgggtggcccaactccaggggaaaaccaccaccttcccactccatccccgttctggcctccccatccacctcgctgagagctacttccactcaataaaaccttgcactcattctccaagcccacatgtgatccgattcttctggtacaccaaggcaagaagccctctgtccctgtgataaggcaggggggtgtctaattgagctgacgaacacaagccacctatggatggctaaactgaaagagcacacggtaacacacgcccactggggcttcagctgtaaacattcacccctttatgctgccgtgggatcggagccccacagcctgcccgtctgcatgtccccctagaggtttgagcagcgggcacaaagaagcaagccacacccccaacgcacaccctgtgagggaagaagggaacttttctcgtttcattgataaatctgaaatcttaccttgcttaaaatacttaaaagaatatcttaatagatctactgatggaagagttataagaataactaaagagtatgcatgacacttcaaaattattgtttcccctctttaaattttacttacagggaaagaattgaaattattccttactagcacttctgtggcaaggcaagaatacactaacgaagatctgcaaccaaatagaaatttgtatacagaaatacacagtaaagtgctcaactgtggggaaaaataatatcatttcaatgagtttttactattcattcaagacgttagtgtttgtaaaaagtaaataaataaactgcttccaagatagaggcaaactgccctggaggcttgccagtgagttagtatcacattaagacaatctttctacacttggctaccagaccctcctacttctccctctctatctcactaacttctcataggagaagttccttctcctatgatggaacttcttcttctttttttttttttttgagacaaagttatgttcttgttgcccagcctggagtgcaatagcgctatctcggctcactgcaacctctgcctcccgggttcaagcgattctccattctcctgcctcagcctcccaagtagctggaattataggcacctgccaccacacccagctaattttttgtatttttagtagagaaaaggtttcaccacattggccaggctggtcttgaactcctgacctaagttgatccgctcgcctcggcctcccagagtgctgggattacaggcgtgagccactgcacctggctgcaacttctttttttctaaatgttgcagtggcctgttctcacgactctggcacatacagatcatagataatctgaatttttcttctagctccaatgccaagtatattgatggtcctcaaacttacatctctagttcatctctatttggatatctatttaacatcccaaacttagcccctgtcccaaacctacttctcctcagtcttctccattttctccttttccaccccatctggcaaccaatccatcagaaaatcctagtatctcaagaatcccaccacttaacactgctgttactagtccaagccaccatcttctcaactctggactactgatttacctcctaaccattctccctgctttcttctgatcccctgtagtcaattttttcacatagctgccaaaggaattattttaaaatataaatcatatcatatctctctcctgctccaatcttccagtagctccctatcatactttgtagaaaatctaaactccttgtcatggccaacaagacctcacagggtgtggtccctagctacttctccatccccatttatctcaagtactccactggtggtcctattgttctccaaataagccaagtacactcctacctgcacatggtgtttgctctgcctggaatgctcctcccacaaaggtttttgaaatttacttcctcaatttatcaagacctctggctaaacaggtcttgataaattgaaacctatttatctctggtccttccctggccatcctaacttaagaggtagctccaatcattttgtacatttttatcctacgttttcttcatatcccttaccaccatctgacattatttgccaattttcttttgttactatttatctcctccactagaatgcagctccatgaggagcaaggcctctgtcctccttattcacctttgtatcactggtatctagaacagggcctgtttatggtagaaactcaaatacttgttgaataaacacgttacttctaatcgctattaaaagattaactgaaagcattaaatttgtaattcaaagtaaaattataaatttaaaacagtataatatgaaatgaaatattttctatgtctctcaaataatcatgcatgtagaagtttatctcctaatttttatttatgagttgcacttttaaaatttttatcatttaaaataattctagagcctctgcctataaaaaattgttcaaacacataaaataataatcttttattagactttgttttttcaatattcctacagaataccagaagtttttccttcttcttttaatatttcaagtatatatatttcagatatacataaaaccaagtcaacattgaatgtattaaaaatatttcttaaaatcaatttctctcttatttcattatcaagaaaacctaatcaattcataatgttaaaaataactgtaagtctacatttttagaaggaaagactatatttaattaaacataagatttgtgaacccatcacaaggctgtttaattcttttaattcaaattatgctataaattctgagcaggtgtgccaaattactgaaatgcaaattgaccagctgcatttttaagaaacccatcataaaatgtgcatggtgcccagtaattaacaagtcttatgcctgaatttagtttacttaaactctaaagatgaaaacaagtttctggcaaaaatgcatctgcaatgatttagcctccaaacagaattaacttattataacagccaaaaccatgaactaatagcttttattgtccatctctagatggaggacaatgcttacaaagatagaggaatgaggattcatggcttttaatagaaatctcgctccacgggtttgctgacacatcaattttaacatgtaccatctattctgttatccaagtaactggtacttcattatttaagtgttttttgaactcacagtttattatagaaaatgaatgtctacacttctatacccatcttctttttgcccttgtaaaaggatgaaaggatgcagtaggtataaattgaatgtcaatgaaaaagatgactgttaaaatttgaaaatagccacattttagagatttagattataaaaggccatcttttcttctcagtttatatataatatacagttgttttaaaactacaaacacaaatttattgtatatatcttttcagaatttaaaagtctctgtatcactccactctttggggtaaaaatgattcattcttgtgaaaacttatatcattcacagctaatcagtgtagacagaatgacagaactagaaattcactctctggaaccacagtgaaatataatatctgattcaggcaagagcatcatggatcttaaaaccccaaaaaatcatcccagaggttacttgctaatcacaatgtgagatcctttcttcataattgagatacttagtgtcaccaccatatccaagtgctcaaaattagcattactaatggtgatagcatatcccttctaatgagatgtaatatgaagtcacagcatcatcttagaagtactcttgccataaatgtctaagctaaatcatgcacctaaactctcagtttgcagaaaatactcgtataagttaatattcctataagttccatgtcaccataaggaaacacctaggaaaactgtagctttttcttttcagaatatcaatgtcattttaaaaaatgagggataattgttgattgcaagagactaaaaagacttaacaaccaaatgtaatttatgaaccatgattggatcctcagtcaaaaaactgtaaaaaaaaaaaaaaaaaaaaagacacatgggaaataattaagaagcctttaacgtgctaaagaattgaagggtaaattatcatgatgtcgataacttactttcaaatgattcagcaaaataaaaatagaaaaaatagaaatatatatgcaaatatgtatgtgcaaacacatacacgtaaagacagatccaagtatgcaaaaaatgtaatctgctacttaaaggtggccagttcatgggtaatcaatatcccagactctcaacttttctatatgcttgaaaaaaattcaaaataaaaagtcggtaaacttttgcattttatgtgcaacattcacagtacctggttcttgaatgacatctaccttccccacactgatctgaagtatttcaccattctttgcaaaagcctcccattctgaatcagtctgctggcaggatggacaccatggggcgtaactataagagaagaataagaattatattgataaatatacagaagaaatctgcaaaacagagaaatcgagtatttaaattaaaaaataaattattaaaaaagggaaattataaaaggaggcttttccaaagtcatttgacatagaaaaacagaagcacattgtccccactaggatttaatgtatgaatgtcaattctataggaaaaaatttggccaaagtttgagaatatttccaataattattattatccataaacattttatttcaatgctattcatacaattatgtttctctccagatagcttttgatctttgagggtaagagctctttttagtgccccactaaaggagaacaattttcacagggtgaccctaaactagccaaaccagtttcaaatccatcaaagctacagatctgatgggcagagaccaaatctgttgtttgagcatcctcaagaatgtttccaagatctgtggtaattctgaacattctgaaaaggaaagtagaagctataggctaaacccgctctacccaacactttcttaaatttagcagaatttaaaaataccttggctttcaagtcagaaccctactttttacagttatttttcattcaataaatactaagaaagcattatggcagaagctgaggctacaattgtgaaggagatttggtgcctcctctccttgtggacggtacaatccagaaatgaacagagataagcatggggggcaaacatcatattattcttatttttgcgtctgtttaaaatttttcataataaagtcttgaataaatagagaaatataccaacttgtgggtaagcaggctgagcatttttaaaatgccaattccctccaatttatttttcatttgttccattcctgaattgtttttacaaaatgtggcacctattatttctgtattaagggaggaaaggggccaggggagagaaagagaagtagaaaagaatgcctgccaatagaatataacactcacacacacaaaatgccttaggaagggaaacaaagtaaggggaaaagtacaaaactgatcaaatcctgtaacaagatttaggctcaaagttgcctgtcaggtcatcatttacaaatcccttcaaaattctgaactgtgcaaaagcatgctggtaagtatcattaaaaaaaaaaatcaatgcaatgacacatataaaccaactttgctgaataacaaaacaaaaaacaaaaactgaaattgggcaagattttgatctttcgcattataaaagatgagtcaggggttaaaaagcgaagactaggggaaggaatgcatttatttcacaaaaagtactgaaaattaggcagaacccagaagagaatggactacccaaagccaaagcattcattactttctccagacaggccccagaagcagcaagacttagcaagcacagttgttcaccatctctagaaaagactactatatagctaattccaagatcatgctaaaacatcattaatctttccattacagctcactgtccaaatcctgagatccagaagacaggaacaacaaaataatctgctgacatctttgaatgtagatttttttaaaccttcgtgtctctgtatttccaaggcaaagtacattcttgatatacagtaggtgttcaataaatgtttgctgaataaacaagtgtatcaactttaatgaaaatcatattcttcatctgagaaaataagttattttctatgtagtttctaaatatccaagttaacagatgagactcaggcagttggcaaactttaggaaaaaaaggaattctgaattatcaagtacatttcaacaagcgttccatgatgttggataagagttctgctataacaatcagaaagatcaaccaggaattaatcatgatattctgggcaggttaataatctctccatgcctcagtttcctcaactgtaaaatgggataataacagtagctaccttaggttactgagagatcagatgaaatacgaagcaggcacatatttatttaataggagcaaccattaatacaaatttcatttgtaatactgcttggggttcaagacacttttacgatgcattagctcatctgaccttacagcctcactgccaaacagacaaagcaggtatagagatgtgcttaagaccactcagagcaagaacacagatggaggtatttctttgataaaaatcgtcaaggaatataaaacttcaacattcagagggagaaagaagttataagaaagtaacaagaataaggaagttatcttgaagtataatataatataatgaacttcagatcctctttatttccctaggacgctctttgcatataaatcacaggcacatttgctgcatcagtaattatgtttcataatttaaaaaatacaggacttaatctctagataggctattactaagttggtttttggtgaaactgaccttcagatatacaattataatgcatcctcggatatgccactgaggtaattttagatatgccatttctacatagctgctatacactggtctgtggcattgttaatgccattatttcacagatttaatcacagctgatttgtgttggaatgcacccagatgttctttcagtggtagagataagccagctctgagtctttagcatgggaactggtccattgttgctgcagtttttaaagtttttaatattcttttgtatctaaagaacagtaatttgtataagaatttagaaactaagtaaaatatctccagggacaaaatgaatgcaaggatcagtcatgtgaccttcatgctcctctctcactctgtgtacacatagatacatatatatataatttatgtatatatgcataaattaaacacatcagaaataattgaacatgatcttcattaaatttatttcaaactagttcacactggcaatcttctcctaagaactataaaagatatgacctgccataactttgtctcttacacataatccttaagagcctccaagagcaattagctccattatagtcatttaaactgtaaattgttatcttttctactgaacttttgttgacttgtttgcaggtcacagtggtatgtaaaattagtaaacttcataaacatatttgaaatatattccagatagccaaaaagctctggtaaattacaccaacttacatgtcagtgcaatgtttttaaccatttctgggaaacaaaattcaacagcatgtttttgttgtccacgttttttgttcaacagaatgtttttgttgtccatgttgtccgtgttttgttgatggaacgaggttgaaggaccttgaatcttttattccatgaacttactgaatttggtttaagatttcattaggtgtgctaaatatttcagagaaggacttacttatatttatttcctagaaaggaaattttattaacgataaatttttatttaccaataatgaacaactcttcttctgtcttgactctaatttcaccagtgtttctcagtacactctcttttctcctgactttttcttatctttgcagaaatgagacagtcaataacagatccagtcaattttcacttagtagaactttgatcaaaatgctcagaatactcagcaacaatgaagaggaaagaggtatactaggttcatctttctatgacttaataaaggaaactaaatcaaagtgtcaacaaaagatgccttaactacatcaagtgttattcttccttttggcaaatgtggaatgacccatgaattgaaagccttatgctcaaatttatttctttggacaataatttctagaacgtgttatcacaaaaggtagaggaaacataaaaactggcagctctatgaaaatcatgacacctgctagagaaagtggaattcatgactttcactagaattaacactccacgaaagcagtgactgctgcatgacttgcaccacagaacagaacctggaaggtcctaggccaccacaataaatattccatcagtgaacaaatgggagatgatagtaattatccttaagacttcagaaaatatataaagatgtctccttcagtgatatgcttgaagaagtgcctgataaaagagcaattaatctattattcactcatttacctagtcacaaagtattttttgaacacaaactacttgttagttattaaagctttggagataaacagggaaggaaaaaaataaccttgttcctttacttaaaagcttataatagaggtagtcaaagaaagacctagtacaaaagcatatcaataaatgtgtaattactggttgtgataggaccatgcaagacacaaccaaagcatagtgagaaagaattttcctggggcattgcgatgatgggaaggcagggcacctgtttaagtggtgaacagtgtcaggaatgagtatacagtaaaaatgttctttacttgcagaaactagagagatggtaaaagcttggatgggccttagaatccagcacgaacaaggcctaccctcatgtgagtcagggtgctggctagctgagggccaaagcaagagtcaaccaggccctgtgccttcctccaggctccccaggagaactgggaactgcagatcagaaactgcaaagctcaggcctgcattatagttatggccttgctccccacttactaaggatctggcattagccagcttctttttttcttttttttttttttatctccactagtcagtaagaatgggaataataccgcactagattgctggaatgatcaaataaaacagttagttggaacatgtgatgtaagccatgtaactatgaactgtgattgtgatgatgaggaagtggaggaggtggatggaagtggtaaggatgacaagttttaatgaggctttaaaccctttgtggaaaccatctaaaatcaaacattcgcatgtttttaaatacccataacagtatctagagcagtggttttcaattagaagcatttggaagtatgcacagggaatgggagttacaattttttgatgtcgcatgactgagactactactagaatataatgggcaagtatgccaaaggttctgcaacacgtgggccattcccacacaccaaagaactgtccacccaaaatgccaatagtgtcctgttgggaagcactgatgaatgtccaacacagaggaagcattcattaaacatttactaaataaatgaacataacttatactacatatttccttcagagcacaatctcttggaaggctcattcttcttcaccttcccagctccccaacactgaacctgacacacaagcatttagtgagttgtctctcaaacattccatcaagacatcaagacaatctattaaactgcaagaaattctaacttgacatgggcaagttaaggtaatgatgttcaacacattctctccaggtataaaggaaggctggaaagataatactaaaacctagatgtcctatggaaataaacaaagctttgctccatcaccaggtgtttaatttaaattttgaaacatgatcattccaaaaacaaaaataagaaaaggcaataatttataaagatttatatgctttacagaggtaaactaacccaaagacatacttttcttctgagtatcagcttgaatgtcaaaattaagccacttggctatctatttcttctgggggaaaaagccaccagaatgtatcatattacatacttccatgtttcaaaagaacaaaagtcattttctccaggactgacataatgagagccaagcaaatgttgaaagtagcaaaaggttgcaaaggaactgaatgaagaatagtataaaacaatggcaatagagaaaagcatgcatcatacagtagtttaaagattagatcatttttcctaattcagaaaaagggcaaacgagtatacaataagcccatagccgggtgcctgtattcccagctacttgggaggctgaggcaggagaattgcttgagcccgggaggcagagggtacactgagctgaaatcgcaccactgcgctccagcctgggcgacaaagtgagactccatctaaaaaataataataacaacaataagcccatagcattaaagaaaatgtatgtagcaatgggagaacttttcagatttctaaaatcatcagaatagaaacggtgaattactgcaaatatacttttaactcatacatttttaaaacactggaaattcaattgcaagaatccaaaaaattgactgtttgaaagactaagaaaaaataaccaaatttaatttcataatagaagcttttcatgtctcagggctgccaaatactgctagattcttaagaataaattatctataccaatataaccagaaactgcattagaggggatctgtatgacgtggcgtataaaagaaaaaattcccagatgaaagagcgcatataagcaaatgaacaaataaagaactctcattcaaagtaatgaatacattttgatatcggaaagcttctcaatctgtgtctttaaagaagttaactacaacaaaagcttctcaatctgtttctttaaagaagttaactacaacatctttgaactactaacaatttccatttatgtatgaccagctcatctgaactaagtgtcaagatgaagctaattttaatgcattttgtttttctctgttatatacataaaaaaaaaaatctggtaacgtataggctatttaaatgaattcttagaaattcatagcaggcctctagtggtatggaggatataatgaattttatatttttttaagtactggagtttttttcacagcaaggaggaggagtatcacctgataatacagaaaaaaatagatcacaaatagataagaaccaaaatatttcttcaggatgagcacttgggttttagtgcgtataaagaagttggatggaatggtttggatcaattttcattgacagccttgcttcctagccacctattctgaagtgcactcgataaaaagagaatgtctactaaaatgaccttgtgtctacacagcttacttccagattacaagactcatctggcatcacaggccaagcatattccatacaactggacacatgacaaactcagagcaattgattactatgtttaggtttatacattcataaaaaagtaaaatttgaaccatcaacatggccaagcacagatgttgttggctctccctcaaaaacttattgaggctttagtgttcttaattctattaccaaaaaaaaagcaattccaaaaggaaccatagaggagttgaagtcattaaaaatgaggaggcctttctgttttaacttttcttacatacatatgcaaactcagttttaccctgaaagatgacatctaggaaaaagtccattttgtaagcacctactgaaaagagaactttctgtagtattggctgacaaaatgcagtttatcccaaactcttaaaattattacaaacatggaagtcttaacacagctccacttattttaaaagtttctcaaatagaatatgaccccctcaccttcttccaaaaatagttaagtggaatattttaataattcatgtctacagttccctttaataatttcattgatttattatgataccaagggtatttcatttggaggtctaaaatatccccttctttgtgactaagaggtaaatgcacatttgaaggggtgatatgccttatgttcttcgagcaatgtaatctgctgtgtgacataaattttggctctgatctcacactgaggttttcactccataggcacctgcttgcaatttaaattgaaagaatcaaaacttggtcttggataaaggaaagatccaattttctgtctgtgtcctcaacgtaaaacaaagattcaatagtagtatacagattgccagaaaccacaggctaaagagatgtggcaatttcctgaaagattttatgtttggggggtgggggcgggaggggggcaggtagggtggaaaggagttgtgggaggggagagagagacagagagagagagagagagagaggagggagagagagagagagagaggagagagaggagagagagagagagggagggagggagggagagagagagagagagaagagagagaggagagagagagagagggggagggagggagggagggagggagggagggggagagagagagagagagagagagagagagagagagagagagagagagtctgcaagcccaccatgatggtctctcaagcccgctcagacatctgcccaccatccactgcaagcctctttcaaatggtcacttcctattataaggttaaactataatcaacaaatccctttctttctcctaactcaaaactgtagtttcccatctccttaaagaaaaggcactatccaccatttgctttctattgttaaaaggggcaatgcgtatcttcttttctttatggcacaattattaatattactcagaaagtcctacctttacaagttataataagtatcaacatttatttgaaatcatactgtaaaatttaaaaggcatccatatttatgttttattctcacaatgacatctccaggtcttcaaacggaagactacgacacaaatggcctgccttcaccgtgctgcaatttcttcaacaggtaacttgcttagcctgtgctacgtattcatactgcacgtggatgtcactgaatgtcctttctcttccaatacatatctgtatctaaaagcacacggtttgcttgcagattttcttccttcccttctcctccctatgggaagctgcccactccaccccgaaaacactgtcccccaaagcaaggggacgcgctgcaccctcggctgtcaccgcgagggctcggcgcgcatgcgcggcgcgagcggccgggccccacagccgcaggtcgttggtaaggcgggtccgcggaccccaggtcgagcccagcggcagtgcaggatcgcaagcggcccggcaccggcgccgcaggttgttggcaagcctggtccggggttttaggttgagcccaagcggcaatgcgggatcgccaccgggccgcgcgggcttgggagggtgacgcccgcgaggacactgcggcgtccggggcgggcgggcacactcacaatttcagcatccactcgccctccatcaccagcgtccagttggaggcggtcatgggctggacccggctctgctccggcggcagcgcggcctcctcggggcctgccgtcgccgccacagccgcgatccaggcggccaggagcgccgttagctgcgggccgcagcgcccacccgccatgttgggcgccgagcgaggcttctcggcggggagtgtggggaagggcagcggccggcccgcagcctcgctcgcccgccgggtttttcaaggaagcgggagacgcaagggccaccccgcctacgcctagcggcgcagactggcggtgctcgcaatgccgcggaggacgccacctcttatcgccgcttgcccgtcgaggccacgccccctcccgcctccacttgccgttgcccggggtgtcggttacctcagcaaccaccgccctttcttcctgaccgccaagctgacaataaacagatgacccaacgttgcctaagttagaacatgcaccgctgctgcccaggctccaataagggcagggttggcgcgtgtgggcttctctaaagggaaacatggccagtaattttaaaatccatcccctcttcaatgatagcaaatataaaagcaacgggctgcaaggtacacgtatgtttaatgaaaaatggagggacgtggtgagtatctcctgctgaagagagaggaaaatttaagtactctgcatgtgtatattgaagcatcactaatttaggatattgatgaaactagcctatgcaattgcattttttttacaaaaaatgttaatttcatagaaactcttaaaaacatgggtactagccgataaaatgagtcaattaagactattgccacctgcagtaaaatggacctcacatttctcttgactacagttttgtcagatctaaaatgagggtagccttaagtgatttccaaatttctttccaggtcacattagatgaatctgtaccttgggaccaccacaccgttaatatataagactggattacaattaaaggatgaggaagctttctcaaagggtgctttgtatgtgtttactagttgtgcaaaccatgaacctcggtaatgtggttaatagaccatgaaaaggatgtggtttctgccctcggcttaaaacaaagacagcaataagactaaaagtacttcagggcacatgagagcaaatttcaatcaatacttataggagagggaagttaattttgcctgaagagaagatctggcctgcattatgcattaattagtattagctaaaaactatgtggacctagcccttatcattaaaataaaacactcaagggtttacaaactattgaaatttaagaaaatgtctttgcaatgaatgctactaagactcactgttattaagtacatacatatcaattccataaactcaatggaaaacattttactgtgcttgtaaaaagaagtgactcataaacaggaattctgtcattttatcactttcatgatagaatgatgtgtagaatttgttttacaatgctccagaaataaaatgtagggaatggaaagaagataggtgaaagaaaagtggtgcaacatcagtcagtgttgaagctaagttcattttgctactttacctactcatgcatatgttggaaaatttacaaaatgaaaagctaaaaggagagagagcatcttcagcatgaaagacagccattaccaaagcatttcctatctttaacaaaaactgaagtcttagccttcagactaaggatggtaggaagaaagtagcaaggaagtatgggactgaccttgccgtaaggagtcacagaccagggtaagggacctgttgctgtcagaccatgattggcatcttagccctgacacttcctagccatgtgatttggggctaaaactagtccacaccaaagttctcttaaaatgcgggtagtaatagaacctgctccaaaaggtggctgtgaagattatatgagataagaataatgcctagcacatattctaactcaaaaagcttacatattaggttggtgcaaacataattgtggtttttgccacaatattgccaacactaatattattatttggaggcaacaatacgctgtaatgtctatttttcttatactaaagttaacttcacttagcatgatacacaatgcctctcacagcccagcttcagttttgcccactttacattccactattcccagagttccctgtgtcctagtaacacaaagctactccccattcccaaagcacattgtgtacttcagtgtctccttgctccttcattctgattagaacactcttctccagttgtccagtgaatcattcagtctctgtcatgtagtccacactgtacctctgatagctcatgcagaatgagctgctgtctcttctcagatccaattgctcttctgtataactgatatggtttggctctgtgtccccatccaaatcacattttgtagctcccctaattcccacgtgttgtgggagggaccccatgggagataattgaatcatgggggcgggtctttcccatgttgttctcgtgatagtgaataagtctcatgagatctgatggttttaaaaatggtaatttccctgcacaagctgtctctcttttggcctgctgccatccgcgtaagacatgacttactcctccgtgccttccaccatgattgtgaggcttccccagccatgaggaactgtgagttgaataaacactttttcctgtataaattaccccgtctcgggtatgtctttatcagcagcgtgaaaatggactaatacaataacttcaccacatacctttcatagtataatgcatttatatgtagctatcaccctctaccctcactcctccaaccactactaaaaactcttcaaggtcaagggctttaccttatatatctttgtgtcccctgtattgcagaatacccatcccatagatgtacttgggatagacagcttctggcactcctcccaagatctctccctcctggtattcaggcccttgtgtgatcctttcctcttgagtgtgggttgggcctggtgacccacttctaacagaagatgggaaaactgatggattatcacttctttgttaaggttacaaaaacctgagacttccattttgctggaaacttcttttcctcttgcacactcactctgcgactctgtgtggagagctccatgtgacaagggaggtctgcagcctaagcaactgagacctcagcccaacagccctcaaagaactggatcttcaaacaaccacatgagtgacctagaagcaaatctgtcaccagtgctcttgagacgggtgagccttataaatgacccagaaccagggggcaaagcttagcttagctgggacctccacccacggaaactgtgaggtaatcaatgttgttacataatatcaagccactaagatttggggcaatttgttatgctgtaatgctatgctaggtcagtgtgtgatccatgtttatgtttaaaacgtggatttacaggtttaagaagattggtacctggtactaggagaaaaggctttttcccccagagtgatggtggcactgcagggcagctatgattacacaaaaatatgtggttcctagtaggcaaaggaattcctaggcctctgatgaggtaacatcattagcaggagagaggggaagaagagtgtggtagatcctatctagtccccctctctttccctgccccacagaggaggatgctcctacacccctcagaagttagtcatatttatatgaattggccaatgggctacaaatggaaggggtgggtatgtatcatttccaggctgaagtatttaatcaccggcacaaaatgtcccagtgttctgttctcctgctgtggaaattttagagaaaagatcatgatctaagagtctacaagaccagagcagcctgaattgctgagctgcctggtggagaatagcagcattgggtggttcccaggattcttaaaaggactttacaaaggtaagaaatacgttttcactatgagagattattcaggttaactatttctgcctaatcaaccatcccaaaactcacctctcatggttttgggggttcaagagctcagctgggctatatttgcttgtactcttttatatggtggcagacccctggaggccgaggccagaattagttgaagtcccttgcacccacatctggcacttagtgtaggctggctggaacagctggggactgcacaggcattgctcttatccacgcagtctctccatgtggctggcttcggcttccttcagcatggcagtttgagggctgtcatacttaatttctctagagcaagagttcccagaaggtggaaactgcattgctctagaagtctaagagtgtcgtttctacctcattctattagtcaaggcactgaagacacaccagactgaaggggagaggaattagactatcctttaataagaagcagcaaaataaattgcagccatactatcaaaaagccactctgaaaatttggaattgtcactgaagcatagtctagcctattttgactaactcactgccttcctttgaatacttatttatgaacagctgagagttctttattttggaggggaggtgatattttcagagagcagagtaagaactgcctctccgtttttaccttctgtgagtaggtcctgtaagatgcatcttatgcaaaggtattggagaaaatgattttcaagcctgtgggcgggtagatggattgatgccttggtatttaagtgttcattaaatgttacagaatttttgttaagcttattgaaaaaaagattcaaaagtgtatgttgagaattatgtaaacacacctattttacccttgaataatggagtaggaaaacgatttaccaagagggataaaacttatattctaatggtagaaaattttaatacatagctatagacaatgcctttgataaaagtaggtcaggacttgatattaagaggataatcaatgaaagataaggagatggtattcagattacaaactctgtaataatagggtatagttatacaatggttttcctaacgaagatggtaaaaccagtatggaaatattaaataagttaagcaatgctgtaaaattagtccataaagtaataatagtacaaaaatttaattacacaaacagatttgctaaatgccttacaggaacaagaggtagaatggagaatttaaataggacacagtaatatttcctagaacagatggtagaagaaaccatgaatgatgaaaatacactgaattgcacccaggcttgtgcctagagacaaatccagaagacttgataagcctctaagaagcaaccccaggacaatgtcatggtgcaagaaaatcatctaattattttcagaactaataaatgagctgaggaaaagagcagttacatgcaagagaaacatacaagtcaattattttcctgtacactgcttagaattaattttaaaatgtaatgtagacaaagatctcattcaatagcaaaaaaaaacccttatgtttcaaaaaactaatagaaatataaaagacatagaaaaaactgcaggaccttatatgacaattatcataaattaatctataaatctataaatctaatgcaataccattgcaaatctcaccaagttctcttctatagaattctaaagatctaccttaaaaataatgcttaaaaccagccaacaggattttgaaaacgaataatgatgtaggtcttggccctcttagatattaaaatctgctataaagttacaattgaagagggaggtattgacatgagaagaagcaaataaatgaatggttcagaatgaagactcaaaaaacaaaaccatacgcttacgggtatttagataggttaaaggtggtatattagtcaggataagatagacttaggcagcagtaaaaaaacaacccctaaaatctcagaggcttaactcaaaaagctaagttctcttttgtgcaaaattgactttgggacgaagaggttctgtagggaaactataacttggggagggtctacacaatacacattgcttaaatcttgtatctctgctgtcgcaacatgaaactttttccatgatcacagaaatataaaaggcggcaagaagctttttctttcttatccacaagtaacacctagcaatccagctcataggccattggccagaactaatcataagacctcgcctaaaagaaagaaaagatggtctaacatgggaactaaatattgatgaacataataatgttcacacatgacatttcaaaccagtgggagaaattcgactaatatacaatagtgttagaacaatttcctcttcattaagaaaaaaagtatatctctacctcaatctatatccaaaataagttctagatccactaatgaaagagcacaaaatttaaactgctcttggaaaagtgtttggaaaataattatataatcatctagtgggcaaagccttcctacgtaacatatgaaacacagaagctataaaagggctttaggaaatttgccacacaattaaaaaaacatcaagcaaagtcaaaccaggtgaaatgatctgaactatagatagcactcaaaggtttagtgtcactgaaattcaaaaagttctacaaataattaagaaaaagatattcaaaccagctgaaaaatatggaatattacttatagaagaacaaaaaacaaatgacatatgtatatgaaaagcagttcatacatactgctgatcagaaatatacattttataccaatacagtttgttggatgattccttttggggttaaagcaattgtgattaggactagccatgctgttattgtaaaatcttcagtggactcaaatcacaacagcttacgttttgtaattatttccccctttcatttttttttttattatactttctgattacatgatattgggagactggcatgtgtcaattttaaggtaagagtaaatggaaatgaaatattggtataatattctataccaattgtgtgcctcaaattgtacattaaggaaacaagaaaaacaacttcagtgtatgaaaaatttgcctcaataatgttttctgctctctaataatcaccagtccctagatgtcattttgattaatacaatttcttaaagtttttaatgtatttacctacacttttctttttgttagtaccttttgtgacctatttaataatttttttttccttaatgtaaggctacaaagctacttttcctatattatccctaaaagttttccaattgtgcctttattttttcaggccttttcactctttaactttttaatactgtgaagtaggagtttaatttaatcttttctcaaatgggtccccagttgtaccagaaacacttagtgaactgtagtaactttccctagtaatctaccactctgtcgtagtctgttggtacatatgtaattcaatttctgagttgtctgttttgtttcgttgaactatttgtctttcctgtactaacacaatactgttttaattagtatatttcatggcacattttgatatctgatagataaaattgtactcctttgtctgtcttctttattagttccttgggtgttcttttctattttttcatatacattttagaattatttcattttagctaatcctaaaatcaaacaaacaaaaattgcttattagttttattggggttacattggttatataaattcaggtagagtactccttttaatacaccttaacgtccttcattaaagttttatattttctctatatagattatacaattatttgtcatattaactactaattattcaacttttaattctattttaaatggtctttttatcatttttttcaaactgtatttctggtacataaaaatacaaatgtttttgtatatgtatataagttttgtaaacaccaatcttgctaaactcttactaatttttaaaaaattgtctgaagctttgtggccagaagagttctaagatgatccctaagatttctgctctctggtgggcactccctttgcgtgtgggcagggcctgtgagtatgatgggatgtcactccatgaataggtttagctgtgtggcaaagaagaaaggattttgcagatgtgattaaggtctctaattagctgactttgagctaatcaacacgggcttattctggacaggcctggcctaatcacttaagagctcttaaggagtgaatgggctcttcctgaaaaaagagcttctgctaaccctgaaaagcaagcaacaaccctgtgaactgctatggagagagatggcctctaacagctgaggacctcagtcctacaaccacaagaaactgatttctgccaacaacatgaatgaacttggaaaaggcccctgagctccagatgagaacacccaggtcaactcaggtcatgagcagagaaccctgttatattctccttggcttgtgatccataaacaatgagattataaatgtgtggtttttaagccattaggtttgtggtaacttgttacacaagcctcttttagattctttacatacacaaatatattctaaacgaataatgagtcttcctttcccatctttataccatttacttcttattcttcccttaccgctttaagacctctagtataaagttgactagaaaaggtggtagtggcattattgtgtagttctttatatcaaagggaagattttcaatgttttcatgttaagtatgacatttactgtaggtttttcatagatgctctttaatcagtttaagcaattcttgtctatccctagaattattgtcaggaataaatgttgacttttatcgaacactgtttctgcaccttttaaaaatatcatattttttccttcaaatggttactgtgttgaattatattagcagacattctaatgttaaagtaacctatcattccagagaaaaggaggtgagaatagcagtttagttatgatgctgtatcccttttataaattcttggatgcaatttgccaatatttggtctaagatttttgcattatgttaatgactggaaatgagtcttaattttcctttatttttctggcttctttgtgtttcgatatcaagaatatgcaagtctcatgcaataaattctatggaagagttggttaagattgcatttttttccttacatgtcttatagaaatgagtggtaaaatatctgaaaatggaggactactgaagaattggatatggtttcttcaggttgtaaagaaaaatatgttaagtatgctaacacttagaaacactcaaatatagcaagctaaaattgtttaatcaattaaccacttttgtggaaacatatctgcagaaatggaatgagactataaattagtgtttcctgaacatatttcactatcaaacacttcttcaatttcagtttgtaaaataaagtgtattttgtttatttaaaactttcttctttcattcaaagatccaagacaaagaatgtgtttagtctagcgttttataaacatgaaatcctgaatatgacaaatgcatgctgaatttcaatatttaatcggcatacatcagtttgttaataaatgttccttatgtattaaagctcagattttgcatttatgatgcatgaagaattataaatcatgtggtttcatcccgttgcaagaatacaatgccacactcaaaagtaatctcaaaatacttgtatttctcaagtcttttgaaagggacacttaagccacatagtgcttcttaaaataaataaataaataaataaaataaaattctatttcttttcctacccaataccttctacatcaaagctgttcttaagtctttctctaatgcatgcacacatacacacacacacccctaaaaaacataacacttttcttagaccttggtctcttgttcctctcttccttcaacaagagccactgaagttacacattctctcaaggatgggagagaagagactgaagaagacaaaacagacttcacttcagcagccaagtggaaagctgggaacactgataaacatgagcctcgtgggcttcctattatacatggatagaccacaccatttataaaggtgaattatggcacgctaacaagagcaattatgtgtaccgatttggcaaattttacttgtatttctgaagattttctaggttattttatcctcttgattaatttttttcttcaataatacacctatcaattttctatggactagtaggtttccaagaaacatgatttccacaaaatgtactgttttttaaagcatcatttagtatttggacatctttttaaattacttccttcaaatcactatcttttaggtgacttagaaatgtccttgttgaagatgtactgaataataaagtttgtaggtgcagcctacagcccagtgtcaaccatataaaagatatttgaatattgtttgtggctttaattcatcacaggcctttatgacttttagtcatgtgagtttatatggataacttcagcttcacatatgtcatagacatctcataagttcatatttgcaaatgatcagctgaggttttattaagaagagcatagtaaaataagctgcagttaatttattgacagaaattaaagccatagctctccttctattgctaatgaaaactattttttagtctccaaaagacaagatttagaatatatatcgaacacttccacttgttaatatgggattctatttcaaacactgtgaattcgtgaacaagttaagagagaggatgtagggttatcatggatgttctgaagtgggttgttcactctttcgtaatttatcgagctacatgcttgtggtttgtatacattccaatatttggattttcctttaattaaagtatttgaaattcgtgttgttgaagtttattaacatgatataatgttgatcatttaggaaattataataaataggttataaaatagcccatttagtgtgatatcatgttggaaaaatatatgtttaatcagaaagaaaaaatagttgaagggtatacaccaacagcttgctagtggttaatgaaattaaaaggtttcctagtggttaacaaaaaacattgtagtgtgtgctgtagctaatacagtttgtagacatttctttttctttttcttttttttttttttgagacagaatctctgtagtccaggctacagagtggtgctgtggtgcgatctcggctcactgcaacctctccctcctgagttcagacgattctcctgcctcagcctcctgaatagctgggactacaggcatatgccactacgccaggagaattttttgtaattttagtagagacggtttcaccatgttggccaggctgttctcaaactcctggcctcaggtgatccacccacctcagcctcccaaaatactgggattacaggcgtaagccgtcacacccagctcattttgtagacattttgacatcaggacacaaaaagcttcctcattttttaatggcttctatgtatttatgactaattgaatcaattttccattgatggcatttaggtagtttctaagcttttactcctgtaaataatgttgcaaggaaaatcttgtacatacactgcattgcatatttgtaagtacatctgtagaatagttttctagaagtagaattgctgacttcaaggaaatatgcatcttaattttgacagccaggtgctccacagcaatggtgctccatggagtttgtctcaattatgcccctgtaagcaatgtacgaaagtacctgtttccatgcatctttgctaatgaagtttgtagtcacctcatttgtctctgaaacttaaagcaaaatatgtaaaaagcacaaggacaaatattttggtagtattataagtgatggactctccttttgtcttttctttttagcttttgtaagattttcaaattaacaggaaaaaaaaatcaaattatagaacagtatttatactataccaccattggtgtaaaaagggttaggaaaagaataaaagtatgtatgtatgtatgtatgtatgtatgatgtatgtatgtatgatgtatgtatgtatgatgtatgtatgatgtatgtatgatgtatgtatgatgtatgatttatgtatgtatgtatgatgtatgtatgatgtatgtatgtatgatgtatgtatgtatgatgtatgtatgtatgatgtatgtatgtatgtatgatgtatgtatgtatgtatgtatgatgtatgtgtgtatgtatgtatgatgtatgtgtgtatgtatgatgtatgtgtgtatgtatgatgtatgtatgtatgtatgtatgatgtatgtatgtatgtatgatgtatgtatgtatgtatgatgtatgtgtgtatgatgtatgtatgtatgtatgatgtatgtatgtatgtatgatgtatgtatgtatgtatgtatgcatgtatgtatgtataagcttaatcatcctttaggagtccaggtaacatacagactgtcacgaatcagagatacatttccctacagcatgctttatttaggaatggcaagggcctatgcaattaaaacactcagatgcagcagagaggcctggggagtcatggtggctccacaggtgctgtcacctagaaagcctttcttttggtgaaattacagaactgtgaagcatttccattatagacctggatactgcccatgcctagcctacttgaactcctgggagctccccctcctgagtgattcagggttctatttactatgggctatcctaagccaggactgccttctaatggcccttcagagataatgcctcttcctcctacaaatatcagttaagtctgtttatcttgaggtccagatgacttggaagttagactagattccctgcctttctcctggggacatgtcccctaaaaaaaaaaaaatccaaaagtgagtggatttcaagtagccaacttaatccttccttttagaaggatacacaacagtattttaggggtgcaggagagctgagatcaggataagatggagattttaaagtgaatttttttggggccatgtaagtgtattacttattttaaaatgattacataactataattaacaaaagtaataaagtagaagcctgcaatttataaccaataccacaagatatttctggattccaattgtatctatattcatggaaaatgcttctatgcatggctaatctaattttggtaatggagtatttggcatagagaagattgggaccgaggaggagaatgtgacaagattaaaatccttgggaacattatagattcttgtgtttggttttggatctctgcctaatcaaagcctttttttttcccctcctgaaatatattagtggattttatacgctttttgaatgtattaatgacattaccatttttaagtttgcccattgtatttgtaactgtgctttctgacgtaatggaaaggcttcaggacatcaccatattaatcctgtctttgttactttatggccttaagaaagacaaaacttttttgtctcgggtgcagatatagtatgggatgatgaggaaagccagacagacctaggatttaggctggacttggcctgcccttgctatttatgtgactcaacttctctgagtttcactaacctgatccccatctgtaaaatgggactatccgtgccaactgttttagcctacattccctagaaaacaaagcctatggccaggatgaaaccatcaatatttaatttggggggtaggagggcaaaaatctggagcagcaagtaagagaaagaagaaacatgaggcaaaaggatatagagaggcgtggtaatcagcagctgtatccacttggcacaagatttcctggatggttaaaaagataatccatgcatccaaggaggaaaagggaatacaattggctgagcttcacacatctctttcccactggccggagtttgcctccgtggactttacctccctgcaccatctagtgacatcctttggccccttcagctgcatcttggaatgccatatgccaagtcctgtggtgtgacatttcactgaagtccttgagtggctggaggagtcagaactccagatgagtctgcctggctgctttgtggtggccaaaagggaagttccagcattcatgggacaagtaaccgtcagccccaggaggtgggcgtgagccggagcagagttggcattgtgtggaagtggctgagacagagagtagctgaggttctggaaggtggctggtgcccagagaattgtggacatgtataataacatttgcatccaatatacccagcttcctttgtgtgtgtgtataatggctaaataaaataaactatttcatacctcatatatagaggtactcaacaatgctagttccttcaaatgctgtttggtgagaggcccgtctataaaagcagccaccaaatgccaaaggagcgaagaaaccaaagaatgaggcaaacaaatctagtttattggtaaaagatattttattgggggaacttacagactgaagcagtggtcttgggtggccacaggacacctttactcccagacccagggctcatataccatacagaaatgtataaatgctctgtacaaggcaattaaaggcaaccctccagaacaggcaagaatactgtgtgcaccatagcctataatttgtgcaataacatcaaggatgacatattcttaactagggacagtaaataaagtaggaatcaggaggcattctcaggactgggagtaatcagaagtcaacatggtggattagcatccaagatgcagtcacttttgtctccataaatggatacaacagctattgtaattttttattagggatacaattaaaactaagaatatattaggtatgttttctttgaacattccagaaaactcctctagtaatcacctagttttaataattagcaatgttttctacacctccatctttattgcagcactattcacaatagccaagatatggaatcaatctaagtgtccatcaacagattaagaaaatgtggtgtatgtatacacaatggaatattgttcagtcataaagaagaatgaaatcctgtcattcaaagcaatatggataaggctggaggacatatgctaagtgaagtaagtcaggcatatgctaagaaaaataaataccatatgtcctcactcatacgtgggagcttaaaaacgctgagctcatagaagcagagaatagaattgtggttattagaagctgggaaaggtaaagggtagaggaaggggagagataatggatacaaaattacagctagataggaggaatgagttctagtgttctacagcactgtagggtgatatagttaacaatatagtgtatgttttcaaataggtagaagaggattttgaatgttctcaacataaagaaatgataaacatttgaggcaatggatatgttaattaccttgatttgattactacatattgtgtataggtatcaaaatacactatacactatattgacaattattattcagtttttaaaaaggaataataattagccatattgttattcttgctttgttaatatctcccttcacattgcttttgctacaaattttaaagcaaattcttggtataatagttttttaacaacaaaaaattcagagcttattactaacaaataaggactttttaaacaaataaaatcaccttggtattatcatatctagtaaaatgaacaaaatttattcaagatttgggggattttttgttttgttttgctttattctccacagataatgtgtcttcctatcaatgcagaaatagatgatcacaagggaggagaaatgtcccaggagggcagacaccagtacaaaagggtctctattgccttccctttccctcctttttctacctcctctacctgtagttccatctcagcctgctgagccacgaccatctcttcaaccacaattgactcttttgcctccactaaatgctgcttacgtggctcctgtccattcagctcccatgaccgccacctctgcccctttttgcttcactttttcactggtataacttccacattttggcggccaatttgactacacagtcacttagctttaggagatcaagtaatctcattacctacaagagacttaagcctagtcaggtccatctattacataatagaagacactcaggtttgggaaagttaaacaaattattcagctctttccattaggtatataagattatacttttttctcttatgtagattttttgcctgaatccagcactttagcccctcaatatcatgttaaagcttggctttgtgcttgtacagatattcttcctagcttagcttcatcaaaaatttttctaagcctgctttttatattttcaaccaggatttgttaagaatattcagaagcctaaagtagttagtccacctgagaccttttttgaggataccatctggtcattggttctgatggttcaatccgaattgcttaatgctgtctgatattcagatcaccccggtttcttaaacatgtcttctaactgttgatatgatcaggttataaggttgacacattgtttttggttgatgtgtctataaattttagcaataacagatcctctttccataccccacaattctatatcgtttatgttttgaagaaatgtgccaatttgtcctgtagaagtttctcagttttaattaatatcatgtcgtcaaatccacttccatctttcactcctggcaactatgacctgttactggttggtatagttttgtttaacagaatgtcatataaatggaatcataatatgtagacttttaagtttggcatgtttcatataacataacgcatttgcgattcatccatgttgctgtgcgtatcggtagtttgccgaatatactccattgcttgtgtatctattctctagttaaggaacatttagtttatttctagtttttggcaattgtgaataaagctattacatacatttgagtagagggtttggtgtgaatttacgttttcatttgatttgaatggaatttctctgtccaataataaaggcatgtttaactttatagaaaactgccagtaggaagtaccattttgtattcccatgagcaatggatgaaaatttcagttgttccacatcctcatcggcaattggaattgtcgggattttattttgttttagtattttagttattgtaatacgaatgtatataaaggactattattctagcataaaatgaaagaatcgatacatggtacaacatggatgaaaaagcattatgctaagcaaaacaagccagaagacgcaaaaggacaaacattgtatgatttcacctttatgaaatagctacagcaggcaaattcataaagacagaaggtagattagaggttactggaggtgtctgtcctctgtgcatctacagtttcattctcagcctcagcactctcccaacaggccacagccacaataccaatgtcatagaattggtcactcccgggggtaaaagggtggagtttgccccacttagggaggatgagtaatgtttttcatcattttaaaaaacagtttctgaaaaactgatagaacattaaggtgaccataaaaactctaaatgttcagttctctgatgtgagcaagaaaacatgctacacatttacaggtaatatataaggtatttaggaagtcttttattttgttgctgctgctgctgctgtttttaaagtacaaatgtggagttcagcttaaggtgtgtgaaaactgagcagccttttctttattggtaagtaaaataataaatagcaggtaaccaaacaagagaaaacatgtttaagaaatatacacgcatagatatatacacaagttttatttttaaataagtttagacttaccggcatacagttcctatttggggtgatacataagtttagcaactagatatcagtaatacttgcaccatattttcaatataattaatggtgctaaattgtatacttaaaagctattcaaatggcaaattttgtgttatatatatatttaccgtaatttaaaagtaattataaaaatctaaaaacaaaaatagatttttcagatcaattttgatcaattttaggaagacagtaaaaggaaagaattgttggccaggcctggtggctcatacctgtaatcccagcactttgggagggcaagcagggcagatcgcttgaactcaggagtttgagaccagcctgaccaacgtggtgaaaacccatctctactaaaagtacaaaaattagccaagcatagtggcgggcacctttaatcctagctactcatgaggctgaggcaagagaatcgcttgaacctgggaggtggaggctgcagtgagccaagatcatgccactgcactccagcctgagtaacagagggatactctgtctcaaaaataaaaaaaagaattgttgagcgttctaaggtttcatgcactgttggactgcactatcaagatagaactcaaaggaaaagagaaaaaggagtataggaagaagtgggagacattcattgggttttgatgacattgaatttgagattgttacaggctattggtaacatgattatggaaatccatttgaaaatcattagcatttagcgttagctgaaaaaactagaatgataattaaaaatcgagatgattttaggaaaagttaacctcctctcccagtctaataagtttggttacattatacaaaaaaaaaaaaaaaaaaaatcagatagaaaacagctcccttcttacagtagtcataattcttttcttgacttttctcaaaatggaaaaattagggtcaacattgttgtgccacttcatagcaacaatctaatttggttttcttttgtttattgccaaaaacttaattagatacataatccacggtcattatttgtctattaactccaggggacaataggcttttgaaggccggtttagagaatcaacttacgtgcccttgtgccttctgtgtgagtggggattgttgctaagacccctagatacatatcaacagaaaagattaatgggctttaccctggaatgacctcactgtgatagcatcccaagccaaggttcaaatgaggtaacacatgaccttagtatagtttaaagctctatataaatgttatttattattattattgttataataaacttaggctgggtcagtggaacagcttgtatctttagcaaaaccatcttaaaaggaagcttagtagtgtgaagactctatgtgtgtgatactagcaggtttctctaaggactaaatgtctctgacatagttccttaactagtacctgaacaaactgcgccattagtgtattgagggatcttcagcctcagcaataataacattttggaccagatagttctttgtgtggtgggttgttctgcgcattgtaagatgtttactagcatccttggcctctacccactagatgccagttccaccttcccagtcctgacaatcaaaaccatctgcaaatattgagaaatatttcctggaggtccaaattgcctcctgctgaaatacctctgtagacatttacatcttgtctcatttataacagagataaatagtattcaagagcaatgctccaattgttatgtaatcggactattgaccttcagagatgctgaatgagagatgtttaattactggagagcaagaaagttgttcaaagtgcagcagttgataccagaacacctatcagcacagggtgcaattggagcaatccaatggagctattatgtagggtgatcaggtcaagattttctcaccactggaggcgtctgtcctctctgcatctacagtttcattctcagcttcagcactctcccaacaggccacacacagtcacaataccagtgtcatagaattggtcactcaaggtggggaaaagggtggagtttgccccacttagggagagatcagtaacatttttcatcattttataaaacagtttctgaaaaactgatagaacattaaggcgaccacaaaaataaaaactgatagaacattaaggtgaccataaaaacgccaaacgttcagttctctgatgtgagcaagaaaacatgctacacatttacaggtaatatataaggtatttaggaaatcttttattttgttgttgctgctgctgtttttaaagtacaaatgtggagttcagcataaggcgtgtgaaaactgagcaaccttttctgtactggtaagtaaaataataaatagaaggtaactaaacaagagaaaacatgtttaataaatatacatgcatagatatatacataagttttatttttgaataagtttagacttacagaaatgtaaaaataatacatgtatagttcccacgtggcccctcatcagtttcctctgatgttaacatcttgtaatcatcaacacaaggatattaatattgatacaatattattaacaaagttaccttatttgaagttcaccagtttttccagtagtgtttgtttttctgttcccaaatctaattcgaggtcctacattgcatttagttgtcatgtccacttggtctcctccaatatgtaacatttcctcagtctatccttgtttttatggtcttggcaggtagatggttcctccatttgggttgatgtgattttttttctcaggattaggttgaggttctgcatttttggcaagaataccacagatgtgatgctgtacctttctcagtgcagcctatgaggtggttcatgaagaaaatgtatcatattatcagtgaatgttatcctcgttcccttagtgaaggtggtacctgccagcttctacactgtaatggtaatatttttctatttatattttattaatatcttggagaagacactttgagactatgcatatatctagcttctcaaacttttgcctacaaagtttagtattttatcagcggatcttgcctacaaccattatttttctggtacttgcctagaaagattgtccatttccttcattccttctacattcattaattagaattcttctctaagtagagctttccacacgcccaccctccatttatttatatcttccaataattactctctcagcatgagtgcatggatatttcttacttctcttctatcattatttgtttagttgtacagattgtgctagtttggctgttgggtgccttttcgagttgtgcctgtgtctatgtgacatgcccacacccttttctgagcatctcttgctttctggcaccttcagaggttccaggctcatcttgtatttttaaaactaaatcttctcttttttttaatttaaaaatgcatattgaaagggttttcatgcagtaaataaaaaagaactaggatttacaaaagccaagtaattatcctaaaaaaaaatgacaattttgaggctgggtgtggtggcgcatgcctgtaatccgagcactttgggaggccgaggcgggtggatcacctgaggtcaggcgttcaagaccaacctggccaacatggtgaaaccccatctctaccaaaaaatacaaaagttagccggtgtggtggtgctcgcttgtagtcctagttgctcgggagactgagcgggatcgcttgaacccaggaggcggaggatgcagtgagccaagatcgcgccactgcagtccagcctaggcgacagaatgagaccctgtctcaaataataataataataataattttgaaagagaagtggtagatttggggaggaaaatatgaagagaacctacagaaggacagtgcaaatgtgcaagaaacagtttaatctgggaagaggaacaagtgagagcagagagaaataatttttacaaaaaatttaaatatcattaaagcacagtaaatgaaaaaagaaaattaaccagaaaagagaagtacattgatgtttttacagcaaggagtaatttaaatctgagttaatataacatttgagccttttataatgttataattaatattcatttgtactatgataacatttatgaaaatttgaggaaatatccaagattccaatcttgggttgctcagggtctcttgattttagaatttgttaaatttgtggacggctcccttctctgagacaaaacctactttggctagattttttttttaaatgagataaaggaagaaaaatgatcagaagactttataagccctgtcctccttatcaattacaatgccaagccttggttagccattacccgttctggttttggtcccttccctgaaggtagtgatcttaagttctaactctgggctcaagctggtgttgatccccccagtcgccagggaatggtgactcctgaggtggctctgcccctctaaccatgtccctgctgtttccacagaagctctgtgttagacaagttctcctcagggtaggaattgtgggctctagatgaaatccagtcccaccagaaacaaagacatgctacagggcataaaaataaaaacaaaagtcctggaacagacttggttgcacttccaatcagtggggaaatgatggcttttgtactggaagatgtaatgttattaaactggataaacaaagtcagatttcttccttacactatatgatcaactgagtgtgagtaggtaatggtttttaaagaagtactgaaaaaaaaaagggacaagtaaaatttgcctaccacaaaattgtgagttcctgttcaatgtaggacatcatagacaatttttgggagaagttaaatgttctttcaaaaatgttaagatattaatatcaataatatccaaagatataaagaaaagaataggtacccaatagaaaaatgggcaaaatatatgaataaggaattcacagtagaaacaaaaatgactaacaattatatgaagatacactttaccacactggaaatcagaatattgagatgtaacagtaaagacttcagcaaagacaatcccccacaggcatatatatcaaatattgataaggctgtggggaaatgggaagcccttctgcactcagggtagaagtctggacagtatcgtatactgaagagaaatcattactttgtgaaatcatatctgtaaaatccctatagtttacagatatgaaaatccctgagaatataaaccaggaaaattcctgcatgagggtcatatgtaaaggtgctttatgtaaacattacttgtggtaccaagaggaggaggcaacctggttttctatcaccagaaaaaatggaaacaaaaaagtgggaatactatggacacactagtcacaaataattggaagtagaaacagtaaggggaagaacctaagaagagcttagatgaaaataaataagaaaccgaatgaaattgagagtgaaacagtgggggaggggagagtgtaacaaaatagaggggctttgtataaaataaagatcgtgtcccaagaattgagatatatgattattttaactctgcaccctgtaaacccaaacctaacatttctgcattttttcctttgtgcagatatgcaacttgttttatttaatctatgtgatgcctctgtgatgaatgaacattaaggtcaaggcaaaaataattgtatatcccatatacctcctgttttatactcagcacatttatttaaaaataattttgagtcacttagccagaccaaaaaacaataaattcaattataatgatcaacacacatgcttataaatttaagataaattagaaaacgatgttatagaaacgtattcacttaatcacatggcctttcctacaagaatgagttaaggttcatatgtctttcaaagtttaactggtgtgcctttttgatattatgccaaaataactttaaaagcaaaattttattcttattttattttttcagggtattcttattaaatctgattatcactcttctaattgctactgaaaccaggaaaaaaaagctcagaaaagatgtcatatatcttcaaattgtttaaataaaattaatcacagataattttcacatttttatctaaaagaagatattataaatattgtttctgaagcaacatatacctttgatgtgctaagaggaaaatgaaaattgtttctaaagtgaagataatgtaggtttctaagtgaaataatgcataaacatgttttatattcgctttcacacccttcttttaaagtctaaataagaaagcttataattaatatataaactgcccacatcactcattctactgcatactgaccaaaaacaaagagagaaaatcacattctatggcatgtggttcctgaggtaagattgaatcctcccggacaggtgagttctgaatcgcttcctgctgattggttctagctgattttaatattgttgccgctagatggcgatagagattataactacgcagtcaaatcttacatgcagtggaatcttctcagtattccgttattcatgcaccgatttatttattctaaagtattctttattatacaaatataattatgactcagataactgcaagttactatgaattcctagaggacagaaatcttttcttttttttttttttgcaatttttaatacttcacataagcataatatctatatttaaaatggtattgctgggcgcggtgacttacgcttgtaataccagcactttaggaaggcaaggcaggaggatcgcttgagctcaggagttcgagaccagcctgagcaacagagtaagaccgtctctacagaaaaatttaaaaattagctggagcctggtggtgaacacctgtgttcccagctacttggggggctgagacaggaggatcgcctgagcccaagaggtcgaggcagtagtgcgccacgattacaccactgcactccagcctaggtgacagtgtgagatcctgtccccccaaaatattaatataatattaatattatattaataataatataatataggtaataataataatataggtttatatgtataaattatatatactatatgcattatatataaatttaaagtaatgcagagggcaagtgttaaacagcaacatatatacctttgcttattgtcttgtaaataaaggctaagtccagaacttggctgactttccaacttgcagaatcaattttttgtttacccacctaggacagagtctgaaaaacaacaagaactcaataaatatttgtcctatgaatgaatgtattcagttggctgttgtctctccattcttcttaagctgattatcattctagtaatatgctatttcttttaaatggcaattaagtgatactgaatttgccacttgtaacagggtatcaaatacaatcacagagtcactaaattgtgtctttgtttcatctccttaatcatattttcccacacttgctttaaaagtttccttgtcatagtgatcaaacacaaaggggagtgaagaaactataattcttcaagtgtctaaaatcagatgatgctgaaatggatcatgtgcttactaaataagacacagagtaaattccatatctgcttggagcatgtgacttcctgtgtaacatggagaagccactcaaaatcacttaatcaccatgtaacaaaagaggcccatttaattatgtgaggatgtgtagaatatatttagttaatagctatatatttcctattattgtcttctcatttccagcgagcagtctatttctgacctagtattacgttttagaatttactttaatatgtagccaacttctcacgccgtgaggatcctcctctgagctcagagacaccaacatccgctactaactgtcctcctcagaggtcggggtcccagccccacggggatccttctccaagatgaattaacatccctctatagaggtctgagtttcagctcacagggtcccttctctacagttctcattttaatcagtccgataccttgcctatgttctcctagcccatgggatggtccttgtttcctgcagctccaattcagtgataccttcttttgccctttatttattcactgctgcgttacacttctttacattgaattcctcaccgtcaacagaaccggtgcaatttgtgtctcctaactgataaacccctctcttcatctgaagtgctcttctaatcctctctattgaaatcttggtgaatttctgatctaagacaataagaattaaaccaatacgtagtaaacatttatatttattctgcaaataaaagagcttcttaatgataggacagaaaaaacacaaagggagacttaacaaacacgtcaccaattttggctaaatatttaccttgattctacaacaaaaacatatttttacaaacattattacttaaactgactggaaaaatacagttcaagaactcttaaaaagagaagacactttgatcctgaaactgaaaacattagtatcctatataatcgtgaaaggaaattggatatgtttaatgaatcctgactattacattgttcatagttagcaagaacagattatattttataaaacttcttgcttctcggggtcaaactaaaccatttggacatttctttctcattcaccagcatgactttttcaaaaattagccacagtttaattgggaagaagttttgtcaggaaaattaaattagctgggatgcagattaaaggattatgatttcttatctattttggtagcttctgtttatctgtaacatttctcagataatggactacagtagatggctcagttttattttgtttaatgagatgttgagcttgcttttcttatttagcatataaattactgtaactactgatttttgaagagtcacattttttcttttaatgaacctacctttactgaacttttttcagactacataatgcttgctttctaaaacaatttagaagatacataaaattatacaaaagaaagtagaagttgcctgaaatctcactatcctattatgtatgcagattaatttacataattttatataaaaatggaatataatgaattttttcatatcactttgtaaagctttttggcattaccttttaatgctgaccatgaggacagcctgcaacccagcaatcccagacctaggtatacaccctagagacacccttgcccatatgccccaggagacatatacagggatgttcataacagccccaaagagagtaaaaggaaaatagaatctcaggactccaaactcactatgctgaagagaaagttaagcttgggaactgagtcatgcaaaaacctccttcctttcattcacaaagtgatggctataatttcacaggcttactttatgtaaaaggtagatttactgagcacacgatgagtgcataactgactttttcttctattcccttcttttcccatgtaaaatgtagattcactgagtgctaatcagaacttcacaagaatgtaaccacttgcttccttgcctatccacccttctattttttttttcttttttctttttctctctctcctgcttgctctttcccctttaaatattgaaatccccaagccctcaagctttttttcctggaaaaagcacaagctccccaagattttttggggaaaaacacaagtcacaggttctactgtgacttgaatttctttttcccaggcctgccctcaaccttggcaaaataaaattctaattgactgagatctgcttccatcactttttggtctactgaaggggcaacacacctgtccatcaataggactggaggcaccagacaattgtgcctttcatcttatgtgatatttctttatcctgttaaggctttcaatcttaaactctctctcatgtgctattaatattgtaaaacttgtgttctttttatttttgtcttggaactacagtgtcagtattaaaatttccctttttcttaaagaaatgttttcctcctttcttaaattttgtacaaatttattcttcaagttcaggaagtttaccagggaattccagatttcatttattcagctctgtcaggagctcatttcatcctttaaccacgaagaaactatcttgcctccacttagggtggtttttttctattatttaattactgcctccccctcatctgttcctacttacagcatattagagtttctggagtttcactccaaattgcttttggttcacctcttgatggccaaatccttgtaatgtgtttgtgtttagagaaatttaaaaacacagggtcttcttgcctgttatatctggtctgctggagtctggctgtgtcgcccaggctggagtgcggtgaggcaatcttggctcacaggttcaagcaattcttctgcctcagcctcccgcatagctggcactacaggcgtgtgccaccacgcccagctaatttttgtatttttagtagagacagggtttcaccatgttggcccacatggtctccatctcctgacctcgtgatcttcccgcctcggcctcccaaagtgctaggtgtgagccactgcacccggcctgctcttgttttcaatatttctcctgaattataaaatttgaaaatgatctgtttttgttttcaaaagaactttattttgtaattaaatctttgtatgtctctttatttattgacttaccaactttagattgttagttaaagttgtcatctgtttcctggagtggttatttttgctggaagctacctgtggagggtgatcggacccatgtcttccttcctgtgacttctgggttcacctcactttattattatttttctgcctcctgtggatgactcacccttaagtctagccttaagtaaatatttgatatctaccaggagcattcaggaaaaaaaaatcacacttattggtgatagatcagaggaattcccattaaagtcttaaggcaaggatagttgctatcatggtcactgcgttggtgatcataaccaaaataatatgacaagaaagaaattaggtaaattgattagaagtgaaatgaaaagactgacattatttactgatgatatcacctgcccagaaaatctaaccatatcaaccaaaatattgttagaactagtaagagaatttatcaagatggtcagatgtaagactaacctacaaatctcagatagcattcgataccagtaataaatgttacaaaatatctagaaataaatctatcaagaaataagtataagacataagaagaaaattatgaaactctacaaaagggaagaaaaggtaatgagtatatagagaaccatgcaaaaatcttagataagaaaattccatattataaatatttcaattctccacacattatgctataaattcaatgcaattacaaataaaattcactttggaaattgttataaaatcttgagaaactatatttaaatctcatctggaggagaaaaaataaagataaaaatagctaatgtactttttatacaaaacaaaaataataaggcattactttcctggtctgctatcagaacttattctaaatctgcagtcattaaaacagtgtggcaataattttagaaaatatggaagagtcagatagactaaataggccaaaagccgacctcttttcagtgggaaattcaataggtgataaagatggcattttaaatcagaaaccaaaggatgaattcttcagtaaagtatattaagattgtgaattctgcatttggaagaaaaataaattcgattaactgcttcaaatttgttacagatcaggttcttcgggaagcagtttatgagacagggatgtgttggcaggaagttttttggggagttgctctttagatcgacacctggggaatgtaaaggaatcagcagtgggccccaggaaatgtcgagctgcagtttaggctcagttgaggcctgggccaaccctaaagggagctgtgaagctggggtgtccctttagagctgtacagtgctggggtcagagggccagcatttatagtcccacaaggatcagtcattggatgtgggctggtccccagaagggagcatgaacttgggcgaggcagctctcccccgctgagagggttgacactacaacattcacaaaatgaattccagatgtatctaaaaaacaatggtaggaaactaagatatggggtgtgagttttttaaaaagtagaatgtatcataatatagggtaagaaggcatttcaaatgataaatgaatttgacaactaaaagattgagaaagtctataaacatattttaacataaagaaagccaaatggcacactgggaaaaaaatatttgcaatgtgttttaatcaatgtgtgatgcacagaatgcaacaaaaagtagctttccttttgatttccaaaagacaacctcaaaatttttttattctttttttgagacggagtcttacttattgcccgggctggagtgcagtggtgtgatctcagctcactgcaacctccacctcctgggttcaagagattctcgtgcctcagcctcccgagtaccaggaattacaggcactcaccaccatacccagctaatttttgtatttttagtagataagtggtttcaccatgttgcccaggctggtctcaaattcctgacctcatttgacctgcccactttggcctcccaaagtgctgggatcacaggcaagagccatcgcacccagcctctcaaaattattgagtagaagcttcagagggccccacgacttttctgtcctatgttcatgtgtcagagtcgaaaacacactctcattttagttcaggatattaatcaacacttcgaacttccttctgagataagatttctcctccttctcgccagctctgtgctgcatttggtggggtccccggccattagagagggggatgtggttggcttctgtttgttcttttatttcgtcttccctcataccctctagctagctgtggctttagaccctgcctggcagaaaagtgtgggcaggaggaaggagaggtgaagatatggagctggaaaacttccagtttgctggggatggattttgtcaccgctgacttcttgtgttctggggctggctgatgtttaaagggaactctcttacataagatatttggtggggtttttggataccccaatggcctctctcaaccccaaccacagcattcgcaccttcctggttcatgcctccgattcactggtggactatacctcagactcttgctgttagagctcccacatccttccagatcatttaagcacagttgagaaagacactcacattcttggacccactgtgagtggaaaaatctttccttcccaaatgtagccctttacagtctctctaactagtttgtcaccgtctagacctcttgaagaagaggcagacagtagtctgctttttcccacctgcaaccgcatggagaacgttgctccttggtgtgaagggaaggaaggcgctttgctggttctgtgggacctgggctcaggcaggaggactcgcaccaggcagagcctctgttaagaaatcccttacgaatccctgtccatcttctcaacctgctgtgcataaagattttcatttgtttgttttaggttcaaatgtattctttttgagaacatcctgtcacgatatataactgaaaagtgattaccatccagaactcataaggagcttctacaaatcaacaagaaaaagacaaatagcacagtagaggaatgtgggaatggtatatacagacaaatacagaaggagaattaaacaaagaaaagatgctcaaagtcactgatcatcatcagaatagaactgaactcaactggcacttggatgtcaaaattaaagacatttaaagcatctagtttggcaaaaatgtagggaagtagatgctctcatgcactgtagtgggagtatgaattggcattttgacaaggactatacaaatttttggaaaatgttatttggccatataattaaaaattcaagtcctcataccctgcaatccattagaagagactatattacattttccagtgatgagtgaaaatggatcatcagagatcaggaaaatatgcacagttgtaaaacagagatttatttttgtgcacatctgatttgtgattattgaagtgtttgcagcatctgttttacccatgtttttatgagaatatattcctgcaacacttacgcacttaaatttaagaagtcgcttcattttattactgttttgtagtaacgtagttccacaaatacaacatttgttttacaaaacataaaatgatttcatcatcacactctgctctttcccgggctactagctttagaggaggtaagcaacaccttcttaacaatcatttaattgcagcttgggaagaattacaaaattacagaattagacaagcatgacatttctttaagccctggtttacccatttcactaggttatcacctatattcttttgagattaaaaaaatcagattaaattctaattttcatattaaaattgtttcatattaaaattgtagaaataaaattttctacagccaatccatattcaaataatcttctgcttaagaaggtgtctccgtggcccatttcctcttccatagagttgcccttctaagagaacttgggcctcaacaatcatatttctattaaaatgggaccgtgtccaacctatttctatagctaattggatcttgatgttcaggtgacccaaggtatattaatcaaaatgtctctcttcagtatctgggagtaagattgagacactaaagagtctggactcgttgcttgaacaggaaacagaaacaagagagttagacgtattcagaaggagttcaaattattctgcagagaggaaaaaataaaagcagacacacagagagaagttgagaaggagacaaggtacagctgcctactcccctaattccataatggcttattccataacggttcatagtcgttttctttgtttggaaataatcactatcagtaataacatttactgagcatgtactgtttgccagaaactattctaaccactttacatatgatatactgtctctttcaatctctatagcagccagatgactaaggactcttacaaccctataaatggaggcagagtttatctacctgtggccttagaactagtaatgcagatagcaacaatctgaacccaggccgaatgactccagagcctagatttgctctctccttatctctcttaattagcttttcttttaattttgctccctgctaccgcaagtccttattttgaaaattccctctttgtccctaatattttctttggcgtcactcccacccaccgaggataaaatccgcatcatgttttgctttgagttgtcagattcttttagtctccttcaatctaaaatagaccccgatgttttattttgttttgtttgtttgttggttttctgtcccatgcctgttcacagttatctactgttgcataacaaactaccctaaaagcttagcaacttaatgccattaaaaaacaaccatttaattttggtcatagatactgtaaatataaaaaaatggacagggcacagtggagatggcttgtctttgctccacgatgctggtgcttcagcacctgagtagctggaggctggaatgccctggagtgttcttcattgacatgcctagggcttgggcttgaatgattctaggattggattcagctgtgactatcactcggaacactcacacacggcttttccatgtggcttaggcttccttacaacatggtggctgcagggtagttagacatcttacataactgctcatggcttcatgaccacatattccaacactacatttagaagctgcaaggcctttaataacctagcctcagagtcacatgctgtcacttcagctctactgtgttgatcaaaacagtcacagaggagggaacccagacatccccctcccccatatattattgggaatagtgtcaaggaatttacatccatggcttaaaactaccacaatatccttgatatttttgaagcatccaggtcagttaaacagattttgaacggtcatgtcatattgttgccttctacaagttatcctgttgactttccaatttttattttctaactctagtttgaagtggatttctgttaaaacttaaagagctctaaacaataatgaagaatatttcaaatgttttaattgtgctgaactctaagtatattgtgcagtaacaagcaggcacgtcttcaacaaaactgctgtttattgttgaagaaaaaggctatgaccttcactttctctggctcacatcaccgaatcaaaaaacaacatgtaatgcctataactcagaaggaatattgaatcataacatcttctggcatgcatcacagcatattgcagggagaaaaagaagactggtgtgccatttttttaattgttattttactttgagttttggtatatacatgccgaatgtgcaggtttattacataggaatatatgtgccatggtggtttgctgtacctatcaacccatcgtctaggttttaagccacacatgcattagttatttgtcctaatgctctccatcccttttctccccactccccaaaagtccctagtgtatgatgttcctccctgtgtccatgtgttctcactgttcggctcccacttatgagtgagaacatgcggtgtttggttttctgatcctgtgtgagtttgctgaggatgatggtttccagcttcatccatgtccctgcaaagggcatgaactcattctttttatggctgcatagtattccatggtgtatatgtgccacattttctttatccagtctatcattgatgggcatttgggttggttccaagtctttgctattgtaaatagtactgccataaacatacgtgtgtggtgtgccattcttttaacaaaaattctaaggatatgaaattctcaaccaagaaaatttttaaaataaggtttattgatatattatataaatgcataatttatatatggtaaaatttacccctttatggtatgaaattctgtgagttttgacaaaatgtactgtatagtcagtcatggaaacaccaccacaattaagacatagaacaattccatttacttcaaatgattccctactgtgccttcatagtcaattccctttacccactcttagcctctggcaactactgatctcatttttaacattgtagtctaaaattttccagaaggccatatctatggaatcaaactgtatgcagctgtttgggtttggcatctttcacttaccacagtacatttgagattcattcatgttgttgcatttattcataactcattctcttttattgcttagttgtattccactgtatgaaggtacacaattttttcttccattctcccaccaagggaaatttgggttgattttaacacagaacttttttttatatataaaatagcagacttgggtaaaaatgaatcttgttatagagtctttaatttcttagctcttcacattttcaggtcatcctgagtttcttattaataaaatttagaaattatcagtctgaaaggaatgatgaaagttttgaggcagcactggtcttttcctaatcaatctttttcccactgaattcttttcagtttgatgcaattgctcctgtttcttaacaagcacgattatggaaagtgttaaaagaggattatgatctgattggtgacagctggcttcataacaattggatgaacaaaggattatctaagtgtacaactttaaaaaatagggccaggagctgggtcagaggatgaaacaaacaccctctttggctgacttttaagctttaggtcctcaaatgatgctgttgcttgggtaatcgtggacttgctgcaggatcaagagggaacaggcagtgggaggcactagagagaaagaacatgatgaatatttcggttttttccattatccagctccctttctgcaataatcagagtcatttcacatggtgtgcatgatttcaataggttagaaactaattttaaatccattaaaaatgagcccatgtcagcattgtctccatgacctcttgcctttaaaactactgagaacaatgctgcctcactgattttctcatgctattgtatcatttggcataaaacaggtgtgccatagatgtttcattgtcagctcaacataatgtacctgcacaattctctaatttcactgtcaatggagcaatcttttctcctttgttaaaaagctctcaaaatcactgtaagtaatgccaatgcatattgaatttaagtcaaataatacatttttgcctttcccactaactttgaatctttaaaaagcaaaatctgaaaaattagagatgagccctggtgtgagtcactctgtgccaaatgtctctggttttgtgacgtcaatatttctaaaaagaagaaaaaaatagtaggaaaaattttaaaagttcttcattacgcttgaagtctcaaatcttttgtcttttatttattttcagttcttttttttttttttacaataatcttttccttaaaggagcttccattgaaaaacaaaatgagtatcaatttggattcacatgcgaccatctgtttcctttcccacctagcttcctaataatgctactttcttagtacctctcttgagcagtgtcttggtgaggtacataactagatacttacagagttattcatagttacctcagccaggatcacaaaatgcacacttatttgtctatgctgatcagtttttgtgcaatgaatgggaatgaaaattgattccattatttttgttatacatataagttaaagagtccaaaagagaaaacacaaaagcataatgaggaaatgaaaaagacaacttgggactttgggggttccaaattgatgtttcaaaatgtatctgacaattgaggactcaattcctgagaggaggattttttttttcttcttttttttttttaattttactttaagttctgggatacatgtgcagaatgtccagatttgttacataggtatacatatgccatggtggtttgctgcacctatcaaccagtcttctaggttttaagcctctcatgcactaggtatttctcctaatgctatcctcccctttcccctgagcgcaccgacagggcccggtgtgtgatgttcccctccctgtgtccatgtgttctcattgttcaactcctacttatgagtgagaacatgtggtgtttggttttctggtgctgtgttagtttgctgaagatgatggcttgagaggagaatgttttgagagagaagaggctatttgaacattcacattgtgagagaggtcttgagaagcgtcatcgagagtgaggtaggtgggtttagggacctgatacttctggcaacatttctctgactacctttgtcttcttcaacttagcagaaaaagagggacttttggatatgctggagattgacagtggctttaataatgtgttaatatcattcaataaaaatagttatcatatacgtgttatatatttccagggactattttatgcattgaggttatcataagccaaacaacacaaaatcactgtcctcatggagcttacatttgagtggtcagaggtagttaaataagcaaaactttaaaacgacataggtaataatatcagtggtgaaaataaagtaaggtactgaggtggacagaagttgctattttattttattattattttttctttttttcttttttttattatacattaagttttagggtacatgtgcacaacgtgcaggttagttacatatgtatacatgtgccatgttggtgtgctgcacctattaactcgtcatttaacattaggtatatctcctaatgctatctcttcccccctccttccaccccacaacaggccccagtgtgtgatgttcccctttctgtgtccatgtgttctcattgttcaattcccacctatgagtgagaacatgcagtgtttgggtttttttctttgcgatagtttgctgagaatgatggtttccagcttcatccatgtccctacaaaggacatgaactcatccttttttatggctgcatagtattccatggtgtatatgtgccacattttcttaatccagtctatcattgttggacatttgggttggttccaagtctttgctactgtgaatagtgccagaataaacatgcgtgtgcgtgtgtctttatagcagcatgatttataatcctttgggtgtatacccagaaatgggattgctgtgtcaaatggtatttctagttctagatccctgaggaatcgccacactgacttccacaatggttgaactagtttacagtcccaccaacagtgtaaaagtgttcctatttctccacatcctctccagcatctgttgtttcctgagtttttaatgagcgccattctttttaaatagggacatgagggtgggtctctctgatgagatgacttttaagcagaggcttaaaggaaatgaggaagcgagctttgtagctatctttggagagacagcgtttgctgcagatgaaagagtttggggcagaggctctgaggctggaaagagcatcatgtgtttgaacagctgcaaggagactctgaggctgagcttggttaggaagagcaagagtggtggaggttgagaccagagcatagcagggacattttgttgtgacatttaaactctacattatttccaactcaccatttgacctcaagtcaatctgacaattgtgcattaactgaagagctattttgtgatgaagttgcttcatgttcacagtttgactgctgagtttcagcctcagatcacaatgtaagacattaaatctttactcttacctataaaatttcaattgaagaacaatatacatattgaaaagtgcaaaacttctatgtgtgaagctcggtgaatgttcacaaactgaacacatccatatagccaatatccagatcaagaaatagaacattcttctacctctccagggtaaccactgttctcacttccactatttgtattacatttacctcttttagaactctatataaatggaataaaatgtgtattctttagcatctgacttcttttgctcattatatttataaggtccctctatgttattgcacatagttaaattttgctctttctctttgccatgtgcgaattatgttgtaaatacaccatagtttatttattcattctgatattggtgggcattagtaatttttggttttagctattacaaatattgttgcaatgaacatccttgtccatatttttttatgaacatatttgtacatttttgtgggcatttaattgggagtcaaatttgtggcttaaaggatatgcatatgtttacctttagtagattatgctgaacagttttctgaagttatttaccaattttttctcctattagcagtgtgggagaatttctattattccatctgagacaactgatattgttgtgtgtccttttcattttagccattctatgtagaggtgtatgattgtaattttattgttttctttttcttttctgtttttttttttgttgttgttgttttttgagacatagtcttgctctgttgcccaggctggagtgcagtggtgtgatctcgggtcactgcaacctctgcctcccaggttcaagtgattctccggcctcagcctcccgggtacctgggactacaggagcgtgtcatcacacccagctaatttttagtagagatgggctttcaccatgttggccagcctggtttcgaatccctgacctcaagtgatccatccgcctcagcctcccaaagtgctgggattacaggcatgagccacaaggcctggcctcctttgatgattaataaagtttgtcacctcatatttttgctggcaactcagtgtttatttctgaaaaatagtttatcagtaacttcaaaagtggttgtgagaattataaatgggaataataacaacacagggtgggacaggactgcatgaaagtgtccatgtgaaaatacttaatatgatgcaaagcagagaataaaagctaaattaaaattatgtattattgttctcattttatgagataaacaaagaataagtgcaaaatatgatggaaactttggcactaaatattccacttgaagaaatccagaagcagtgatgggtgaaaacaaagaaaagatgaatcactttgatagaacaaataggaacaaaaatggcactggaacagaaataaatgaatcaaaataacttcagaggctgcaccctttttatttcaaattataaattcagtgttgaacatcaagtaagagtcaaaataatgacattaaataaagcttcatctttaacagcttctatgcactttagttttcattattgacatatcttattgaactagatattttcatcttcggcctgtgaattcatactatttgaatataagtaaaatgcattttgttacattcagtacaattcatctgtggcttatttttacaatttatcatcattaagtatctgttgagtcattaagtggagtctggcccgaattaggccaacccaatgcataggtagaagaaacaggaatcagcatggtggaatgctaataccaaaactttgtatctgatcacaacattaaaggacaaggagaatttaatggagtcaaaggcaaaacagatgtatcaagccactaaaataatagcaataaaagaacagacacaatattgcacatgttaggtgcaaggaatgatgcagtctagaaatacagctgtgtaataggtaagtggagggatgaagcctgcaaaggtataagggagcaagattatgagggatcttgacttcatgctgaatttgttctgtagcctttagggacttgtgaaatgattctgaattgagaaatgaggaatgacacgtacgtattctggtaaggttactttgggaatcttgcacataatagatgaagcggcccttgggttaggaatgacaaagttttaaagactgccagagaagagtgggtattttatgcatagatttttttatgtatacacagattctctttcttggcatctccactccaacctaatctaaatgaggaatcatcagcaccatattaagagagtaattaaatgaaagcataataattaacatatatccatatttttaatgcccttaaaatagaaaaaagcaatcttccaaataatatatacatttaatgggtctccttacactattcttttgtcaactctttgtattactataatttattcattcaaaaaatatatatatttttaaatctcttactatgttttaggcacagttctagcactggaatgtagcagtatacacaacagactgaaaaacctcaagaaatttagtgataatccaaaaaataactttcccccccaaaattcacagcaacttcattatgtatttactttctccttccctttgtcaaggacaactacagctaaacatacccattattgtaatatacaacctgcattaggcttggcaactaccataggccaagagacacctgtctcatagagataagtggccattatgatttagcataactctgctaactgtaaaatgctaaataaacattaatgtgtctctgtaattcagtaagtgaagcctatattttatggatagaatttaattcatgttcaaaactgctttaatttttcacatcatgagagcttttgacattgcacagttcattttcccaaaaaggacagtgagtccttaaaataattatttaactaacctctgagtgaactggctctgctgtcactgctaaaatttggatgtactcattgtattaataggttttggctcatttctgcttcttccatctttgaagactagatctttttctcagtgggctacattgtgaaaagataaaaggcatttttaaaaataaatcccactgttacttctattatttcctcttagaatttcattctggaatctaacatagttaaatcataaaatagatggcattgaagatgcttcatcattgtgagaaattcccttatataatgtttagctggctcacactgttaaaactgtctgatattttatctcagtcccagaaaagttcccaggattagaagcaaatacagtagaggcttttcttcaactgatcattaaaattcaaaatgtttactactaacgtgtttgcaaatttgtatttgaaaatcatatttggacatgttttgatcttatttgaactatgacctctgtgtattataaatcttgctttgaaaacccattgttattgttacatattttctgctgctttgataaatgtaattcctcacttcaataaggcaaattcctgccagaatatcaagattcacaagttgcccaaaacactataatttcaccgaaataaagcaaaacgtttcagaatagccatctggaacaaatccagaatttaagaaatattcttaacttggatgagcaaaatttctgtgcaatagggttctgttccattgtatttataggttttacagatgccttcacatatgttcttttcctctgagaaaacatgaagaaagctaaatatctatagaaattcctgagaaagtatgttttaaggaaaactgtctatgtggagagaaaaaaaataaaaataaaatgaacagatttttgtttttctcaacactgactagtttccttgaaaaggttccagtaggggaaatcataaaataaaattacaaataaggtagcttgctaaaattattatgcatgaaaaacttcctctacagtgtgttccagatgaaaggaatttatatccatatttcagtgttagtcatatcttcactacataattcgtcccgttccattatgtattccactaccttcccatgagatcctgaatctttttatacaccagaactccaagattttatttgcagtattggcttaatttttttaaacatatgaataagatgttttgtatgcatttttatttttaacaccacgctgagtatattccaggcacaccatgtctatatgagaaggttacataaaaaaaaaaaaaaaatcacatggtcatgcttaaagaaatgaaatgcagagtttacttctcactctactgaaggtcaaagtttatttctcactttactgtagttcaaagtttaaacttctcactctgctgatgttctaaatttatttctcactttactgaacactgcaagatataaacaaatctctttaaaaataaaccaccaagagtgtattggagatgagtgtccactgtgttatttctttgagtgaaaatcaatcatgtgactagagctacacggactttaaaaacaagctgattgaacgtggcgtttaaaatatctgaaaaatataaaggcatgcatattttaaccttggctttggatgttaagagtgagcccaaatcatcctaattgtggttgactgaagctatcaggatggtattccacagtttacgactcctgccaggccacagtatttccaggctccaaggtcagcaatcatcccatacttgttcccacagcacccgtcattggaggagggtgtagagagacttatgccccttttttacttctgagagctaaaacattgcctgtgcaactgcatcacatgagacagaccttcagagtcgctgtttccccgtatggaaaccaaggaaagaaagccatcaaataattctgtaactaaagagaacaaatttaaagaaaataatttccttccactgggatataaaattttataagaaataataagatttaagtagaaaaatattttctatttttaactggctacatacacaggaaaattcagtgaatagattgcagacacattattttagaagttttaaagagcatagctcaaaaatatatttgtgaattcttttcaaaattcttttatttctcatagaaaactttatatgctacttgatgtttattttatactgctttcttcttattttctaaggatgtgaactcttttaataaaaatgaaggacaagtaaatttgtcattcttatatgttaaacttacatgttaaactttaaatatgaaaaaaatttcctttatttacagtaagataagttaatgtttttagcatgtctactaagtgctaggcactgggttgtagaaattcatatcaaaatttttttcattagagtgaggaaatggatgagaaagtatataaataataagaggtaggatgtggttattgcaaatagctggcatagacaatacataaaatgaaaatttaaaggagataaattacttgaggttaggcacgcagggagggttttatgggaaagtaaagaatgaaataatattctaaagtggaaaaacattcattcattccacaaacttcctaaaagtaccttatgtacgcaaggaaattctcaatcttctgtgggaacaatagtaaacacgtatggctgtggcctgaagacacttagagtttggtaggttcatcagttgtttattgccagacaatgctgcattatgataatcataaaaccttggtggcgtacaactagaaacatttatttagttcacaagttcatggttttgatgatcttggctggactcacttgctcccacctgggcttgttcctgtgtctgaggtcagctatgggttgctaaggttgctctgtgggtcttggtggggtctgcttatatggattggggcagagggcagaagggagctggcagttgccagacgccctgggttgacaaaactttggcatatttcatctgtcagcaggaatttttctacttatgtcactttgactaacatcccattggtcaaatcaagtgacacggtcatgtccagtgtcagaataagaagatacagcaagattaacaaggcaaagagcatgggtactgaagggggcaaagcactggggcctttgatgaaatctctctaccaaagcgacggaaatgcgaactacaagctttgtttgcttaaggaagggatacattcacttgggatttaagagtagaatcaggataaattcaatctgtggtgggtttgtgaaaaaattttcaaagtaaatataatttgagtaggattttgaagaaaggattcgatgtgagaaaatttctatagatttagtggagcaaagacacagaaagcaggtcagaaagcagtcagccaagccaggtgacaaaagagacaccaatttgactccagccttaggttagggtagtgaaaaatcttgagaacaagatttccaacacagactcaagtgagagtttaatttttttggaatgcttagctaaggagtctggattttatttgtaggcaacaggagtcttaaaaatttgcaaacagaggtatgccttttctcaggatagctgatatccaaaggggaacttgtgttcagctatataaatttgctactacttatgctcaaagtatttattagccctaaccagagcatccccactgcatggaatttctttaataatgatataagctgaggtggaaagagttaagatgttaatggacactgatgcatgcaattttgaaaatgacttctggagtaagttgtggctcattcttgtttcatacactgattttgcaaagtcttgaaatgtttttagggcaaatagaaaaaattaagactactccagataaataggaattatggttcctagttaaaaagtaggaactggaacaaaatacaaaggaattttagaataagatatactttcttacgtgatatacaatctaatgggaagagaaagcatagtgttaaaatatgttacaacaattttatgtgacagaggtgcttgaaagagttttgggatcactaataagagaggtcttatgggattaaatttttagtgaactacatagtaatttcatttatacttattctaggacagcctaggacagaactgtttgaattatagagtagatgccatcggtaccctgtctacaaccttcagatcttatcgcttctgtgtccactggcctactttcagctgcaggtatctgcatcgctttgctggagaatgttatccaaagctgctgatgtcctttctgcttcactgcccatgtacatggaggtctgaaaatgacaaggaaataatacccacagagagaatcctcaatctatgattgaaggaattggcatgtaataaatgccttgctcctcaattggggtaactcttgggtgtgtgttctacactgtctcttagagttccccagcaagattgatttttagtaaactcacaatggttacttgccggatagcacaccatttattgactcccttctcctccatgtctcacttccccacttccgtatgggtacctcctggatcacctcccagataagcttcttgcagccaaatgcttatattggagtctgctaatgcaggaacccaaatgaagacatatggtatacatgtaattgattttgtgttagccagtcatgtcatgtttgactaacactgaaaatgatgcatgtgtatatacagaagtgatgggaatgactagagaactactgaaacataaaagctctcctgagccacacttgtaccagttttctctcttgagatgcttaaggctccactttaccttcaccaacaaattagcctaacattatcttttatggtcaatgatattccattctagctcattctaatacaattagagcctactgaaagtgattttttaaatgtagagagatttatttggaaaaaatacaattccatttacattacttttgttgtctaggcagtacaaaacttaagatgggacatgataaccagagatgtgttccataattggtgatgagagacagccactagcataagtgaaagaccattttcacttggtctttcacttaggactcattttgtagtccctctctttcagccacgaaatttccagaaagaatcacaaatttgattttataagaatgatctcaagggacgcttagtaacacctatttttatattttttttgtgaagtaacaataattccctcatctcatgttaaaatcaggagaagtaaaggcaggagctactacagggtcatatatgagaagcttattcattggtcgtagttaattatcttctcgattcctaattacgtaactggaagaaaatagccttttagtccaagaatcaaagctgctgtggtttttctcaaaatgaaagcccttattaagacaaaatacaatgaattaaaaattttcccaattttaaccccataaaattatattcccaaattgtgtttatttaccaagtcaattcacactttccaagtcagtttgtttctagctccttgcagcttccttatcacaagcacatacaagagtaatgagtaatgtacagacctggaaaatggaccgcccattaaaacaaccaggataaataagaaagtatgaccctgtcctcaaaggcaggactgaagagatgacacattaaaaagtacaacgacttcctttctatccctggaacatcaagagtacttctgtcaaaaattgatctggtatcctccttagctgtaaaatataatgcctacattaaatcaagatatgaaaaaaacaattttaaaacattagtaattcttatgcagcataacctaattaaacaaattacttttagaagtgagcagtgtctgtcagatgtccaatttttaaagttgctattactagttccatttcatagataatgaaattgagaagttacgaaactctcccgaagcttgtatttctggatctagaaacgatgtcattaaccatcatatgatagctaaaaagaaacaggtccaggaagaatgtaagataccatctgttaatttgaaaaggagatgaagagattgggaacatgaggtactgccccgctgggctacagtaactcctttgaacagagaataagccagtcttaatttcattagattagcttcagttattcgtaatttatggtacactgttaaatttatgaaaagaataaaaattcaaaacagacattgcctttgaaaatacatgaagtattttttttcatgtcatttgttatgtctttgtcctatggccaattatatatatttagggagaaacaaacaagtgagggaaatctcattccagaaactttctactcagttacttttcaacctttcattatgtaaggtccatcttgaaagcaaaacatcatctgatcatatgagagttttcacgttaatgaaaatgactgtgataatatctaactaatcatcaaaaggggcactagttcttacttttacccagtcccattatttttctttttccattgtttgtttggctatatctcgtagatttcatgaaagataaatggctgagataaaaatgtaagccatcaacacattgtacatatcttttagtgatgttacttactttctgtaaggagcaacataccatagtcaagttgtgccaaatctaccgattaaataatgtcaaaatcttaataaaccctggtaactttgtctagtagtaaatacacactcatcaaagaatgaaaaatgttaaagtcattaaaataggaacaatttcatagaacttctctcctggtacccttggtgacagggagaccagttggtcacaaagataaggtattcacctaagattaagccgtaaaatccacaaataattgaagtccaacaaaccagacactgggactgaacctattagtggtacttgacatataacatgggtcttagattgtgttctccagaagcaaaccgtgagaccagggtacatgtgcaaatgatttattaagtgggtgttcccagaagaaactggttaggaagaggcagaaagagagtagggaaggggaggaagttaagcaaaggtataatttcaagtgaagtgccaaccttcacttgaaggtaccctgatcccaagggtacctctaaagcttaagttgtatggtggagttggccccgcttcaagacaaaggaagcggagttgttttgtttgtttgtttgtttgtttttactccagtggcagtcagttattggctacagattgcctctagggagacgtgaaaacctaagtatttctgacaccttaagaacctgatgaaatagccttatggtggtcctttcaagaaggttataggtgtgagttgttaggagtgaagcacataaaagcagagaagtagggacataaaacttgtaaaggttagccaaaggcttctggagttggggacagcaacagcacctactacatatacacggggtcatgatagcactagtcataatgccaattaatatttgaggttagttttgctacattagccagctgtcttggtaaaatagaaaacccagtgtggccgtcttattgcaaaaagggctgaatttgccccacgctgtgagccagccatagtttgatgatctctgatcaagattaatggtaaaaaataaacttgctacacaatgggtaccactgttaacactgaattccaggatttgctgcctaagctaaacaaggcaaatctaccgtgtgaccccattgatgaagtgttgcccatagcaccaaaaatagaaattcaatccataaaagtcaaagtaattctttttttctttttaaagttttctgttcccattaactcagcatttccctgcactttcaacaagacaatttgcagaagaaagaaaacctctaaactaaaaagggaaacagaattaaatacgcatgtttctactgtaggacttcttactagtattaacgcacattgtaaatccccaagaagggtgatactaaatacaaaattgtattatccccaagaagggtgatactaaatacaaaaaagtcagagtagaaagaaattttaagttctgacaattttttaaaaaccctagatcaaacaccattctaaatggagaaacatttaaaatattattttcaaaattaattctgaggacttcttctatcattacttttacttattgtattagaagtcttggccagtataataagagaagagaaagaaatgagaaacataagaatttgaagcaggaattacagtacatctctcattagttgcacgggatggttgttgacatggaaagcattgtgaactcacagacagattattagatttaatagaatttattaagttggttagttatgagattaataataaaaagtcatttatatatttttatattaataatagtgcaaactattagacaacatgaagaaaaatataccacatcttataagagaataaatctaatagaagatatgcatgacctcaatggagaaattataaagttatattcatagatattaaagaagacataaataaatgaagattttcaagattaagaagagtaatattataagtattctattttttccccaattcacttacagagtccatgcatttccaatcaacataccaacagaattctacttggaaattgacaagataatggtacaattttaacagggaaatataataggccaggaatagtcagaatccttttgaagaagtaagcaaaaagagaagatgagctgtatcaggaatccagacatattatttaaaaaatggaatttaggacaggaaggtaatgggatagtgggataaatattaatcaaaggaattgacagaagcacagttcccagtaaataatgaactttggttcatagcagaagagaaatggatagactgttcaataatactcacagaactacagaaagtggttagcaatttggaaaacaatgcagttggattttatattccacatcatattaaaaaataaactcctgtcaaattaaagtcttaaaggtttttaaaatttagaaaatatagatacatatctagaatcaggaaaagaaaaccaagaaaaattatgaatataggattcaggatgatggttatctacagcgataagtggtaagaatgggacgggaaggaaccatatttacgtaggttgttatcaaaattttagcttttttgttggacagttggctgatgagtgtatattatttaagataataaattaaataacaaaataaaaccacaaaagcatgttatatatgagagtatcacaaactcagggttgtaattaatccgtttatgtaaaactaaggtcctaattcataaacatactattgtttttaacatattaatgctccacaattcagtatacatgagaaaagaaacatcataacataatggcttttagcacggacattggggttagggacacatgggttgacatcctgattttgctctttaaagctaactggctctgcaaagtttgttaataattttaaagcctcaatttcttcatctgtaaaaaaaaaataaacaataccttacttggcttggttttgaggttttaaaacaagaacataaaatcattgttgccagtgattcccaatatttcacaaaagcttttcaaatagaagaggagagtctgcataggcatctctgggtagaagtaaaaggaatcttccacaagcataagctatctttagactctgttctacctctctcaaatttcatgctaactttgactattttaaagttctctttctaaaatgttttaaatctcttatcatgggtggaaatagggaaaaataaaactaagagaagacacagtgatcctcagtttgtgaacttgtgtgtgcatgtgtgagagtgcacgtgctgtagcagggaggtcccaatttacacttggctccgggggtgaggggccacaagctaaaaatgtgaatcatcaggacagtgccgccttctggaaaggtggaaatgtctttagcatatctaaaggcaggtgtgttcagttgggctattgaatcatgctttgaagtttgctgggattctaatgaactctcagaggaccaaaaaagaaagtaatcaattctccatgtcttactagaatagataagaaaagatgttttaaattttgtaaaaggtaggtacatgcagttcatcacttccatggtgacagggcctttgaggagcagggctggcttccatgggtggaatcattggaggtcccagattaagaggtcatgtattcaatattcaatatgaatataaacagagtaatagatccttgctggcccaaaatgatcctagtcacagcatgtctcagcagaaagaatggaggagatctcaaaaatggatgcattttgcatcaaggaaaaacagtagcaagagccaagttagagcttaagtcaccacaattcctacccaccaggagtgtaagtctgaaatccactttatggattaccaaattctttcaaccaaattcatcaatgctgtgatgtgaagacagcttgaagtcacaggaatttcacattggatctccatgggagaagacttaaaacaaattctaatttaattttagcaagaaattaaaatgatactccttgtactcacattttcatggaacaatttatatctgtttctattatgttaatataggagaaataatgttgaatcaagtcttgccatgtcagaagattgggctaaactgaagagagctgatacacaggcaatgtcttttttccattttcataatccaatttgtaagaattcagacttgcccaaacagagcattgggaccaattttatataaaaagacataatttagagtagtaacaaaatctgttaagtacctaagaataaatgtgaaaaagctgtgtaagtccttttgggggaaaaattatttaaacaagttggtaaaggaacaaaagaaaggcctgaataaatggtgaggtatatcctaacctgggtgaaagaattcaatataaaagatggcatttctctccattctatccataatagggaatatatttgacaaaatttatcaaagaacttgacaaactcattctagaattagggaagagaaaaactacaagagtaaccaagacaccattccctttttttttgtttttttttgagacagtgtctcactctgtcccaggctagagtgcagtggcacaatctcagctcactgcaacctctgccttccgagttcaagcgttcaggtgactctcccacctcagcctcccaagtagctgagaccacaggcacatgccaccatacccagctaatttttgtagtttttggtatagatggggtttcatcatgttggccatgctggtcttgaactcctgacttcaagtgatacacccgtttcagcctccctgctgggattacagacatgagccattgcactgggccccaaaactattttttaaaagtagaagaaggaggggtaatttgcctaccagttaccaagattcatgatatacctgtaataattaagagaatgtatttttaaaagataagataacaatggtgctcaaacagagaaagacaccaaaagcaaaaaaagaaataaaatcatgtatggggcattgatacatgaaagtaaagagacttcaagtttgtgggggcagaatgctgctgggatatttggttttctgtatgaaacaggataacttgtaattcatatcatgaaataaaacaaaacttgataaagattagctttaaaacaaagtaaaactataaaagtctagcctagtatcttaactacctcagaatacagaatgatttttgaaaaaagagataaagaaaaaattaaaacaataaacagagattatcataacaaaaaactgatatattgaattgcatcataattaaaagctctgtacatacaagaaactgcaataggcaagttctatgatgtgcccctattatctctttctcttggtattcgtgactttagataatcccctctggagtaaaacttgcttctaacaaacagaatacctccacatcgaggtcatgtcatttccgtgattagattacaaaagattctgattaccatcttgctagcacactttctcccttgcttacttcactgaagcaagttaccttgttgccttgctaacagccaggcaggaagtaaggccctcgattcagcattcaatactaccaaaaccacataagtgaacttggaagctgatccttcctcagttgatcctttggtttagccccagccctgagtaataccctgattgcagccttgtgaaacaccctgaagcaggggaggccacagctaggccaagtcagattcctgacccacaggaaatgtcagataataaatgtgtgtagttttaagctgctacacttgtgataatttgcttcacagcagtagataactcctatagaggccatgagcagataggtatgagtcagagtggaacgaggcattacaacacatattacagtcaaagttaaacctttgacttaagattacataagaaacttctacaagttattacaacataaaacaactcaatagaaaaatgggcaaatgaaatgatcaggcaattcataaaatagaatcttgcgttgacaataaacatgaaacaatggttatcctcactagcattcagggaaatgaaacttaaagaacaaataatatttcatatctgtctaattagacaaaattttaaacagtttgataaagtcaagtgtgttctgaatatgtagaaatgagaattgacagacactgttggtaaagtgtaaattgtcccaactgttctgtgaagcaagttagcactattttgtaaaaattaaaagatgcacaattatgacccagcattttcatttctaggtatatgcttaagaagatatgagcaaggatatttattctgactttttttgcaatagtgaaaaataggaaacgactcaaatgcacatcaatagtagaatgatctagacattagacatgcttagccgtaacatacagcaattacaacaaatacattggatctgtaatatttatatagatctcaaaaaaggacattgaaaaaaataaattaaataacataatacatgatatgacattatttatgtaattaaaaaattaaaaaataatatgaattaaatactgtgacgatatatcataagatctttattattattattattattcaaaaaccaaccaaattcatcagggtcatcaccttgggaaagaaaagaaaagagtgatcctgggggaaatccaaatttttttattttatttttatatctgtttttatcatttttattttattctttcaaaggattatattttatctatattaattatatttatctatacaaaatataagcttgttcaaattttgggtggtggtacagagatgtttgttatccttgccttttgggggagatattaattttcaaaataaaataaattaaaaacaaaaatattaaagataaaattattgtgtggcaattatttcctcattgcatgagtgatgcccaagagtgccattgaaaagagatttccagaaaatggctgaaatacatatatgacaaggtttctgactgctgtgagtgaaaatgtcaatgaagaaatttccttgcttgaaagtcttatcacgtatcgccatgatgtaagactggaaaagtggtgtatgtgtatttgctgtttcaacactaatgtagccttctttccacactaaaggatttggagataaatattcctcacaatcagctctctttaactcacaactttacatatcattgctataatctgattgtatgatttttcatttgccattgtgtaacaaactacgtcaaatctcagtggtttaaaacaacaacttattatttttcacgggtgtatgattcagcttagtggttctgctgatcttggccaggctcattcatgtatctgatgtcaactttgggtttggctgggactggatgatttagcacggcttcaacaggaccatctggatccagtccatatatttctcatcctccttcaggttaacccaaacacattcttatggtgatgccaggggtccgagaaagaaagtagaaatacccaagtgctttttcaaagcttgcttgagtcaagccactggttcaaggaaagaatcagtacagggtagcactattacagtatatagttgccaggaggtgtgaaaaaatggggacattaacatagccaatctaccgtaatacttaaaaactgtcggttttccttgtagctcttgtaataagatttactaagttggtcaactttggaaaccaccacattgtttttaaatcggcaactttatattatttgtgggcaaataacactccaggcagtccccaaattaacatattttatttcctgatgtgaataatggaagtcctgcaggtgagttcactcccctccacagttctagtctactccaatagagaccaggaatcacaaatataagagacagcagtcctgtccactttggccttacagcattggagggttttcagctgccagttgaggttgccatgtcctaattttgaagcaactctggatggtggggtagcaccttgctttgtgctagattctcctcaaggtcaaattgaccctctgagggatagatctgtgttcttttagccccttacttggatattttccaggttctattgggtcccagaatggtagagagacacaatttgctgttggtagccctttgatggagattaagactgcagtggaacagaacttctaggggccaccatacctttcactgatactcttctatggaagggtgtcctacaggcaggtgagatgctatccacactagtgaaaggatcattgctgtttagacacctggcaaggagagacactagctaccatcaaaaccatagctgaaaacatccttgggttgttaggaccaatgagaagagacataaatcctggctattagaattctctgtgcccaggcctttcagttcatacacagtaaaattctttggcttgaggcagacctagttttactatttaaataattcttacttcagaaacactagactcctccatggattgctctgctaaactcaaatattggatctgatatttggatcaactaatctctggacttataagtttatttcaagttatctgtagctctctgctgctcctggatctttgtggctgtcactgtggtttcagccttacaaatctctcatttagcaggaagcatttagattcctgcttcccaggagatccagagtatctcgtataaattaacctgcctcctctatctgagactagctctgacaatcaagcaattacctgctcacagcaccttcctttgacattacaactttgcctaaatgataagtatttaaaacacacattaaaaaaccatttttattatcccagtcattggacaggcagagaaaaccaagtgacaggctctttgaggttaagtgtataattttcagaggattgaaaggcttcattcaggatgaatacaagttagttccattgtagatgtggtcccacatttccacacataaatctcagtccatacttcattcactacaaatacacacatggcaattaataacacacacacacacacacacacacatataaatacatatgaataatacaaattcagccttaatcctttcatgaacagccctttgctcagtacccacctcgtgccaggtacagtgcccagtgctgagttatatcaaaagaacacgaagacaaacatgatatggtttcagttcttaagcacctgtgtggttttaaggcaggaacagctataggaaaaaatgagcattttggcatcagtacattttttgtaattttgcataaatatacacacatgttattcatcatcagaactcagagaacatggagaagttgtttgcaattcacaaggccaaagcagtttttaagccttcagagatgctttaaataaaagttccaggacggaatttatcagaagcaggcctattgcgtacttggaaaagataactaaggtgagtcagctcctggctttttcttttgatataactcagatgactgtgattttgccaaagttataaatggccagcaggccctttgctgaaacatattttctttatcctgaactgtaagttttatatcttctaccctggtaaattttatgcatgtcaattagaagaggcattttagagaaaaggcatagatgcatgttgaacagtgatacctgtctcactactcaacatcctcattagtaccttgtttaaattacatttttggaaattctccatatggataattatgaattgataaaggattctttcaaatgatgtctacattcagcactagaaagattattaaataatctctcccacattgttgccattaatgatttcactctgagccaggtttgatacttatagaaacaactgagtgttagcatatcatttcactttcaataatttgaaacatagggtgataccaatttctgagatttatactcagacctcaagtaaaaaagacagaagcagagtaaaagaatggcagagagagagagagagagagagagagagagagagagaaggaatgaatttcctatctagattccagagatagaaaagggcttaattctttaacaatattagaaggacataacttttcttcccactcactggagtgacccttgaaatgtggaaagaatctattatcattattttgaaggcctaaagcagaaccgtatatttaaaagcatatgcctaacacttttagaaagcatgagacattacaaaagaatgcaagccataaaacataattatttttcagcatttaaggaattgattttactcacttaaggagttgggaatgggtatacatcacttcctaataattagtaatatacttggcaaaaagtgattatataatacctgaagtcagccaaacatggacaacctaatatggtcaggaaaagcaataacctttaggatgctaaacaggaggtctggtctacatttttagaagggatgtggacacaaggtttagtatttcatgttggtgtctctaaacttaatatgggtatttctcaggatgtaaagaaagctaatcatttactctgtaaacatttgttttatatgtttattctagtaaataacaggaatattgggcattgagtcattacacaggatgaatttttgtcattgtttggaaggacacttgtttattataaaacgtttttgaaaatagatattcaattgaaaggaccgcattcctgtctatttctgaaaatggtcaattttctagttaattactggacaagatgtgttctgctggaggacactggtcatgaactccctttggctctcagaaaagtcaagtggctgccttcctgtgtctgcctctccccaggaaatcaccgactaaagtcagaatcctgaactctcttatcaacaaccttaaatgctgggagcaaaatctgacgtcatgagtgtccatatctttcctgctttctggaaatgcctgttggatcacccatggaaatgtgtaggaggaaaacgagcaatagggatttttcaatttgttaggtagaactagtgcttccagttaattattcatttatattccccctatggcttttagataagttttatattatttatttttattacatgaattcatatgtagattctattggcaaattttgttcctaaaatagcaaataaaactaaagagtttttgagtgatcaccaaacccatacccttcatactatatctttttattccttttgccgtgcatatacattgtatgtgactgtgtatggatgtgtgtgtatgcattcatatacttataaactatatgtaaaacatatggttaaacattttttccatatagtttggctatttgcatttcctccccattaatgtcctgtctataacattcaagtgaagagcttatcaaaatataaatatacagggatttttgatatatgaattatttcataggttttatcactgtacaggtcacttagaaagattttagacatctttccttgtcagagcatagagaactaccaatttctttaaaattgctgaataggttttccatagagtatatttaacagattttattcaaatattccctttttgtgcctctttgcacatgtttcaggtttttctagcataaccagaagtagaattgttcaaaggaactacatattttaattctaattttaaaggaattctgtgaaattctccttcaaaatagctgcactaaattattcccagcagtcatgcatgaaagttaatgtatctctcatccttgccaacacttgagactgacaaagttttaattttttgccaagttgatgcaaattattgcatcaaattttgttcaaattttcagttccctgggtaacaagtgcagttgagcatattttccgtatagttattggtcagttgcatttcttaccttaaatttccaatttatgaaattcaaataaatgcaattattattgttatagtattatttttgtctatcttttacctatatttggtgaaagtattttcttgtcaaattgaagaaattacttatatatcttgaatatctatttaatttgtgttataaatgatttccctgttttatggtttgtcttttaatttcaataatcacatattttataatataaaaccttaaaattatgatttaaatttgtcagactttttctttatagcattgtcagaccttttcaaagccacaaacatactctcatttttgttaaagttttttttatatatgttgattttaatccatctggaattattttttgtaagtggtgggtggaaggtagggtttgaattttattgtttccagatggaaaatctgttgcccaatatcatttagtgactagtttattctcttgctgataggaaatgccacctcatttacatatgaaattctcatagatgcacatgtactcttgaccaatttctcccatttaaatttataaaattataccacttacaaatattagaaattcaactattattggcaataattatgctcttcattcatttaataatgtttactgtttactgcatgtctattatgtgccaatcccactattctaagccttgggagagagcaattagcaaaatagactaaggccctgcactcatcgctgttatgtctgtaaggggtggtgggccagagagcaccacacaaccgacaggtatgatgtagctgaactgcagggtgtcaaacttaaaaaaatgttgacattctcttatataaagatctcatccattttatcttcaccaagataaggtatctggtgttttttttttctttgagacagagtctcgctgtgttgcccagactggagagcagtggtgtgacttcggctcactgaaacttccgcctcccgggttcaagtaattctcctacctcagcctcctgaatagctgggattacaggcatgtgtcaccacacctggctaatttttgtagttttagtagagatgggatttcaccatggtggtcaggcttgtctcgaactcctgacctcgtgatctgcctgcctcggcctcccaaagtgctgggattataggcgtgaaccaccgcgcctggcctaacttacttatttctaaacttcacatcagaggtgatcactatgcaaaactctgaaactatagaaaaagtacatggcaagtcctttttcctcaaaaaatttgaaatcaatctgaggaaatgagacagcaacaatcaaaaggatatgatataaatagtcaaagggcctaataaatgaaaggcttcaagatagtacagcgttaattttaatattaataaaataaacaacaaaaaccatgccaacctgagggaccaggtctttgtgctgtggacagattggtctaaactctactctagttataagtatacaaatgattggatacaaaagcatggcattcttgatcaggggaatttcattagttttactgaaaaaaagaaaaggatgtgtcattagagaatagacggaaaaaagtagtatagagagagcttttagaggtccttaaatagctaaatagtttgtatcttatctacatcaagggaaatcaaaagaaaacttttcagcagaagaacatggtcaatgtgtaacttcaatgaaccagtggtcctggaaaccttgaagataagacttctctagacaaaaatctgtcttctttaccttaacttttctttacatttttctcttctcccaaagatgctcagtatccttgggctgaccttttctctatattagtgccttttggtattttggacactccagaaatacaaaatattcttctctatttctcaactcccaaggaaaaattaaatagcctctgccacatatataatgaatctaaagataaccctcaagcacagatcatcatggctgctcttgaacctacctctcctgtaaaatacatttgcatgtaacatgagttgctgaagagtcaagagacaaaaatctctttgctcaaaagtgtatgagaatttctgtttctggggtagcctgggaggagagatgcttttgtctctgggtaagctttaggtcttgcggtagcctctaaaatgatttccaatgatccccacctctgggctttcctctgttcatgtcatccccttttctgaaatgtagcctggacttctgacaaacaggatacggcgaaagtgatgagatgtcacttctacgattaggttataaaagactgttttccatcttgcctgttctctctggctctctctttaggtgataatgaatgcaagccaactgctatgttgtaaactgagtgatagaaggcccctatggaaagggactcaaggaggactcagtctaccagctaatgagggcatgaatactgttaacaaacatgagagtgaatttgcccctagtggaggtttgagctggctgcagcattagtttgattgcagccttgtgagaaacttccagacagaagacccagcaaagccacacccaaattcctgacccaaagaatctgtgagatcataaataatttattgctttgacaagctgctaagttttgggtaatttgttgttcatcaaatataactaatacaggccacctcccagcagaacattttgtagctgttgtaggactcacagaatgttggcataggaagagattgaaatcaactgaatttatgccctgttagatgtttgagacccctgtaatttcctgcttagagacggtcaagtaagacttgcacatctcccatgctgtaaacatcttaacacaattttcggttgactctggaaatttcccctgtaatagtctgttaataatgatgaacttttatgtctccatgatcaactgtcattcatgttggcttctcatttgtgataagaaaaattatattatctattaaaattgatgggaaaggaaaagtatgtcgtttagaagatcatcattcttggtctaactcgtctttctatagctgagtttcccgtgtaacaacatgtaatctcagaaaattgaaatgtaaaatgtcaacataaatgtgctctgaagccatgataaaaagtgaaaaatggattgtctctgtagttgtaataaatacccacaaatatttcttttttaaaaaaagataaaatacatctaacaaattgtatagtcatgtcagtgatttggcttttttaggaagaaaatctgcacaatgataatccataaactcataacattaataacaagctctccattaataacaagcatgagacagctgcactgcatcttgaaatcccacagcatttcccaactgcactgctaacaaattgaagtcatacacccaaatgtggtgaagcaatccatttactagcagctgtgaaacactggtcagctgaaatagactctgaagataatttaactggcaaaggcaattgaaaaaatactgcactcatggatgatttgtgaatctgaggctattgatagcctgcccttatcccttgggactcatccctgcactatgaaggctgcttatttcaaacacctgctgctctctgcctgtgagctttaattctgacctatgttcagggcaaaccagaaatgctggaggagggataatgttctttatccaagcttcaaccaatgttggagtagaagttggaagatagatacaccatctcccttcatctctgttggtgtaacttcaatgtatattctacattgtctcccagagtctcccctcccacctacacacatttaagcagcagttgcccacagtaggaactgctttataatgtagcctttattgcctgactttccttccttatcttatttttctaccccactactagtgtttcctgagatcacttctaataactagcaatgttccgaatatcactcaaagtatttggactcaaatccatgtctccacttcggttgctagggaaacccaacctaagacaacttatttggcagttgcgcatttaaaccaggtattatacccaaagaatttgggaagttttatacccactgaaatgcttaacaacagaggacacaaaatgcagcaagttttctcgagtaaggaaccaaaaccagacttgggacattaccttttgaatttttgttacattttcttttacatatcttcaattttgaagtggttccagaagtccattagcttttgttacaacagagatttccaacatagtcttcaaaccttcatgaaacagagggttaaatatagtattccacaacccaaagagactgtggatatatgtatccacagaaaggttcacaatattagcaataactataccttaataaatgcttattatgggacaggaaatgtgttattatacatatttaccttttctgtgttcaaaataaccttaagctttaggtactgttcttgttgtcttattttgtcattttctaacagattcattgttgacataaatgacataaaatatttacataaagtacaatttgacaactctagacatatgtatatacacatgaaataattatcatcattaggatagtgaatataccccaagctcccagaaactttctcatgatcctttgtaattcctctctattccttacctcttctcccctgccttcctcaggcaacagccagaatagattaatttacattttctagaatcttatgtaaatgaaataatacagaatgtactcttgctatctgacttctttcattcataattattttgagatgcatccgtattatatatatatctataattcactcttttattgttgagtttattctgctgtatggacctactacaatttgcttatccattcaccagttgaaaaactacattttttttaaatccatttacctgttgacttattctttccagcttttgattattataaatgtaaacatttttgtataagattttgtatgtatataggctttcattttggagatataaatagcagtgcaattactagattgaatggtaaatatatgtataacattttaagaaattgccattgtatcattttatattcccaccaacaatgtatgacaattccagttttccacatcctcaccaacacttgatattattaggcctttaatttttagcagttcttacagtgtgtagtggtatctcattgtaggtttaatttgcatttactattgattgatgttgaacatcttttcatctgcttatttgtcctctgcatatcttctttggtgttcaagtaatttgccaatttttattgatttggagttttttgtattattatttggatttgagggttatttacttattcttcacacaaatcctttatccaatatatgtttgtcaaatatttctcacattctgaggttcatttttttcattctgtaaataccgttttttgaaaataatttttaattttgatgaagtccaatttgtcaatgttttcttgtatgaactatgctttaggcatcttatctaagaactctgcctaaccaaaggtcataaaggctttttcctttgttttcttcaagatgttttaaagttttaagtttaatattgaaatctacgatttattttgaattaatctgtatatatactaagagatatggatcaaaatttattttttgtttattcaatatatccagtactacttgtttaaaagactattcattctccattgattttcctttgcgcctgttcctaaaatcaatggtcaatgaatatgtaggtctatttatggaatttctattctgatctattattatcgttgtctaccgtcacacaaacacgacactgtcttaattattatagctttataagtattgaaatccagtagagttactcctccaaatttgcttttctttttagttattttggctatttcaggtcctttgcactttcctttgaattttagaatcttgtcaatttcacaataaaatgcctactctggttttgattgagattgcgttgaatctattcatcaaattggagaaaattgccatattaacaatatgaatctttagattcatgagcatgagatgtctttctatttatttagatcttctttaatttctctcagtaatatgttgcagttaaaattgtagttttcaatgattagcactgccacatctttattcaggcttatccttaagtactttgcatttttgatgctattgtaagtggtgttattttaatttctgaatattcactgctaatatatagaacaataattgatttttgtgtattgcttgtactctgaaatcctgttcaagtcaattattagttctaggagctttttttgtagatttatttggattttcaagatataatctagctgtctttgaatgaagacagttttccttcttcctgtccagttggaacaattttaatttctttttcttgctgtattcagtagatgaaatctccagtacaaacttaaatagaaatagtgagagtgaacatcattgtcttgctcctgatcttaggaagaaagcatttagtctttcaccattaactatgatgttagttgtgggtttattgtagatgttgtttatcatgttaagtaacttcccttatgttgctagtttgctaagaattaatctaggaatggatactagattttatcaaatcctctttctgcatttatcgacaaggtcgtggggttccttttaggtctactaatattgtgcattacactgactaattttttttaatgttacataaaccctgcaatcaatggataaaacctaattatccatgatatattaccttttttatttatcaaatgatttcatttgctaaaattttgtttagaatgtttgcacatgcatttctgagggatactggtctacatataatataacgtatcttgtccgtcttctgtattattaatagtgctacttcatacaatgggttgggaaatattccctgctcaccaattttctggatgtatttgtatgaaaattgatatcatttcttccttaaatgtttgctagacttcagcagtgaagccagttaagcctgaagtttcctttgtgggaaagattttaattacaaattcaatttctttaaaagatatagggctattccacttacatatttttcttacatgagctttagtcatttgtttcttttaaattatttgtgcatttaattttttgttgaatttattagcgtgcagttgttcataatatttccttgttatccttttaagatctgtaaaatttgcagtaatatcacctctctaattcttaattcttataatttgtatcttctcactttttttttcctggtctgtctgccaagaggtttatcagctctattaatcttctcaaaaaatcagcctttggtatttatttttctctgttatttttctgtcttgtattccattgatttccagtatgatttttgttatttcctttcttctgcttatgttaatctgttctttgttttctagtttcttagatggaggttaaggtaattgacttaggatctttcttgttttataaaataggatttgagtactgtaaaattaccagtaaatgctgattttagagcatctcacaaattttgaaatgttttgttttaattttaattcagtctaaaatatttcctaatttatcttttgatttcttttttaactcatggattattagaagttattaccaaataattgtggattttttagagttttttaatgttaatgatgtttatttttctcccaagttgacagagaatgtattttgcatgatatgaatccattttcatttattgagatttattttaatgcccagaatattatctatcttagcaaatgttttctgtgtacttgatagtaatgggtattctcctattgttgggatgggtttctagaaatgtaaattaaatcaagtagggtgattatgttgttcaaacttctgtattcttactattctctgttttgttctaccatttgttgagagagacatattgacatatttgactataattgtggatttactcattttttcctatggttctatcggttttcacttatgtattttcaaattctgttattaaatgcataaacaatgaggattgttacatcctcttgatgtgttgactgctttatcattgtgaaatgatcttctttatatctgtaatattttttactctaaaaatgcctttttctgatattcacataatctcttcagctttcttttgcttagaatgagcacagtatatttatattttttcactcttttagttttaacttgtttattattacattaaattatattttgttttacacaatataaaattggggccttatgattttccaatatagtacatttgctttttagtaggagtgcttgaaacatttgcattcaatgtaattactgttatgcttagatttaagtctgtcaccttgctatttattttgcatttgtctcatctccctttttcctttttccattgtttggattaagtattttgtgattttatctcctttgttggcttactaggtataatttcttgttgcatttgcttagtggtcttttttgggtttgtaacatgcatctctaacttaacacattctaccatcaactgataatatagtcagtatagagtttaacaatcttaacaatcatatataccatttcatatctcctctcccaaatcttgattgttacatttttacttatgttataaatcccacactacattattatttttgtttaaacaataaattttcttttaatacaatttaaataataagaaaaataattcgcttatatttacccacatagttaacattgccagtgtttttcatttctttgtgggtctatatttctacctgctgtcatttttcttttgttaagaaaacttccattaagatttcttgtaacatagatctgttggagatgaattctttcgactattgtgtgtttgaaaaaaattcattatttcatatttgtgtttaaaatatggtttcttttctgggcatttggaactctgagttaacaggcttggggggagaatgggcaaggtttcagaattttcaagctgttgctcccttgtcttctctcttgcattgttttctgagaataatatttttgttcatctatatagatatctttttttcttgctatttaaaaatttttctcattattaccgagtttgagcaatttgatcaagctgtacccaggtatactttcttcttcttctccttcttcttcttcttcttccttttcttcctcttcttcttcttcttcttcttctttttggtgttcattgaacttcttggatctttggtttttcattattcatcaaattgggaaaaaatatcagttttgtttctttaaaaaccctgccttttggcatctctatttacttgtgtaggtaagcaacgtgaagttgttccttagctcttggcatttcatttcggatagtttgtattgctatgtcttcacattttctaacaatttactctgtaatgctcaatcagctattaatctcatccagtgtattttttatctcagacattataggtttcattcttagatgtgtaatctgatctttcatttctctatttatctttttgaatctatggaagctgccttaatgtccttgcctgctaattctaatatctgtgtcagttctggattattttcaagtaattgatttttcttctcattgtgaatcttattttcctgtttccttttaagcctagcaattttctattggatagctggcattgattgcaaattttatcctttcgtgtgttaatatttatatattactataaatgtgtcctgtagctttattatagaagagagttaagttacttacaaacagtttaatcctttcaggtcttgcttttataacttgttaagtgaatccataggatacttagtcgaaggttaattattctttactactgaggcactgtatccaatgttatatgaattttgaggttctccagtctggctagttggtacagccactgttctcagccctgtgtgagtgttagacgatgttcattctaatccttttgactcattctttccttggtctcgggtaatctctatagaagcaagtgccgatcactgctctgctgagtagccacaggacaccccttgcatatttctggaatgctgtctctattcagctctcccgtttccaacactttgtcaagagaactgtagacaacttgttctctccacacacagctccttctcctcaacttaaggccagaatattctgggctttccctgggattctccctctctttgccaaggcataaaaattcatagaatggggccacttaacgactcacctccttggtttcatgtctctctgggatcgccattcttgcttgtctaatgtccagtgtcttgaaaaccatagttaatatatttcatccagttggttttattgtttctgatggaaagataaatctgatccctattattctattgttgctggaaccagaagtcccctgcaattccttattgcaatttaataaatgaataaactaaaacacagggagtatcttgcttaaggtcacacagtattaagtggtaagggcagaattcaaacatagaatttcaaattccagagcatttactcttcactactactctctacagtttatgtaaatcatatttcagtccttgccacctagttaatactcaacaactattacttttaatattattgataataacaagaaagctattaaattgaggcaaaaaatgtacacagaacaaaaaaattaaaagatcagattacttacatacaggcaagggactctaaatcacataaagtaataacataaagaacaacagtaattcaggtacagacattaaagaatttttttcaaatagttaaagttgagcaagaaaatatggatctaaatcttaacacaataaattcagattaggcttcaggaagaaattctaattgtggaacattttagaaacctttacttgggttgcaaaaaaccaacaaaacattttagaacatttagaaacaaactgagctcctctgcatttcacactaaggccattgcacggcatccgggtccttttgctcctcttgggagtccctttttcacagtttctgccttagggaaaggtcatcatcccagtttttctcttgcattattttcacctttatctgtttcttccagagattctagtgaaaagctgagaagactgcactgtgaatcagatatacatacatatatccctgaaggtgttctccagtgaggactcccccgaaagccactgacttaaaccttctcaagactgattcctggaaaatgtaaatagctcactttttggaaatcatgcgaatgagaggcccagatgataatgtaaaagcattactagagttaaggggaaaaaataagttaggtcagtcactagtttatcatcacatgtgttttattttttttaatgggggcatctttatcattttgtttctgatgaatatataaaagtgtatactggactacgctctctatatatgcacatattatatatgtacatacataacatacacacgcacacacacacatgcatgcacacacagacgtgcgcacacacacgcacacatacatatccacaaaaggctgagaaacttgaagtgacagctttcaatctctcctccagtcctttgattctgtctaattaaatctagccatttctcatacattgcagtagctggcaggtaatattcatcatttggcagccaagaaggtgatgtttattgcaaaccttgagagtgagaaaatactataatagttccttttcttcccaatctgcctccatacagctagagattaaaattaatactgtaaaacatctggcttagggcctggtacagaataggagcctaataactgacaccacacatttctatgaatgaaaaattttgggaaataaaaatattactgatggagggaatgaagtcaattagaaagaaaaagaaagaatggggaggacagggtagcatggcactcagagcaattttttgctcaatcagaaattggaaaatgagtagaatgtatagataagacaatgatgaacataagcaatcaattttttggtttaattaaggtcaagttaacaacatatcccaggggactaaaagttacaaggcactcagtaagtgtagttaaacaccatctcaatggacccttgggacaatctccattttcaagaggatttggaagctcctgaatcaagaagtgaagtgcaaaactaaaggtttcaataagactagtggaagggaggagagagcaagtatgttttacagaagatacttcaggatagatgataaatcaggcttggaggacaaacgcctctctcactatcatcttttctcatctttggtaattccatactggcccgagtggctttattctaacttgcttactaatgcttcaattttaaaaaatgtttttgctgatttaacctcattgaaacaggaatcaagtatataaaatacaacgaatatttaatggaatactcatatattttatcaaacaattttacatggtaaatataaacttcctgttactttttcctttaaaaaaactattctcaaatatatcatagtgtatctcatatccccaccaccatgaaattttttgactgagatttgctcttttctcttgcacccgattagtagttttgtttccgaatccactgtactgagtcactcacgtctgtagagccctcatggtttttcctcaccttttcagacaatagaaatatgatcattgcaggcaatgggttattatctgcaactcccaggagacacagttccttagatattccaaatatttcatcacaggccacagcattgtacatttaggaaagaatgggaaagaattgcatatccacctgtgcatgatatttctgtagttgcaaaagttattctagagaaattgcattttcctcctccttcttatcatttaatagcatgctttgaggtgcatacaccctctgggaagatgtgctctctgcccaatggggttgctgctaagaaactctgggaagatgtgctctctgcccaatggggttgctgctaagaaactctgggaagatgtgctctctgcccaatggggttgctgctaagaaactctgggaagatgtgctctctgcccaatgcggttgctgctaagaaaaggccctgactgaccctttccatcaaacccacatcaaccctttttgaagaccgagcttttaatcatgtacgtatttagctctgaattgaaaaataaatggtatccagggctaagtgacttagcaaacaaatgatgcgtggaaattacatagccatgtactctcttgaattgtcccacagaattggtttaatgagatggagatgacaattaactttttccaattaacatgtctctaattcaacattcagttgctgaatgtcaaagaaagctccacaaatcattcaggggtcaacaactaaatgctatgagcagagtttttaatgatcttactttctaattttaatatgaatttcaatattacattaacatcctcttcccatttcaaaacattagaccggtgggcactgcccctcctttgctccaaaaatgcagagaaaacaatagcatttagaaatctgagaacttcaaagaacttctttatttttgtctagataggaataattgcaacagtccaaggccatgacatttggggtcaaaagaattggatttgaatcttgattcttcccttcctagccgagaggcattctgcaaagtgcatagtctctggttcattttctgtaaagtgggagaaatattaaccattttttacagagctgtcatgaggatcaaataggttaacatacataaaatgtctgacaatgtcaattcctcctattttaatgtaaacacaatattgtgagttcaaatcttattaactgccatagttagagggatcggggtggtgtccatatttccctgccagaatttataggttgcagtgacacatgtgtcaacttattattataaggagtcttatcctctgtgagtagattttcataatttttcttagtatttctcaactcattacagttctgtaggcaattgtcatgctatatacagaaaagctagagaagtacttgataatttgtctaaagcttagcagattctttgactcttctagcctaccctgtggcatgttctgattcaactgtacttttagcttctgggttcccccaaatcacaccttatcatctaaatctacgatattgaacattttaaactccaagtgctcataagtaaaaaataacttatacataccgtctataaaatagatttatttataaatgatatgtatgcacttctgtactaatgcaatccatacattttaaaacatggattacaaaataaacataaataaaagtgctcatattttccttacatattacagtagatcatcttgcacatcccttggtgtgcatttcttttgagatataatgcttctcctgttgaaagttgtatgatggtggggaatgaatgaggcagagcagttgatgctagaaactatcattgctttgttttaaattgttaaaacttctttataaggttatacattggccatatttttgctgtagcagattcttttactctcattttacaggcagccaaatcaggcttctttactttgccaacaagaactggagggaactgggctcttggctgaatgccagccaacacttttactagcttcatgtttttgttaccaaacattacatcgtgtcctttgagatttacaaagttggcttcaatccccagactgaattctgtgcaaattttcttgccctctctaagatttccacaagttccacagaaggtttatatccccatggttacctctcccttcactttctcattgtgaaattctctatcttgtttacttcttgctaccctgcaggggttctgtcctctcaccttgaacctacccaggagagaaacatgggtcaccagcataggaaatgactataatagctggaagagctatatcacactgcagaggagcagatatttacaaataaatattacttatcttctcatatttattcttaaatattctcccagtcttgagcaaactttgtttcaaagaggtgaattgcaggacaagggaggccaacattagagttgtgcaatagcacttcacataacaattgttgatccttgtgtcactataccaatatgccataatcgtgacgtgtgatacaagtaatttattcataacagactatgactaatacatattgttactaaatcagaatggaatcagggctactctcataaaaatgtcattttcacttccttgaattgttatacaaattacagagtaggagagaaagtggtagcattgcaacaagtgtgctgggaatggtgcataaaactggtgtatctctgagagttgccccatatgtgaactttaaccatgcttaaagcttcagcaagaaaatgttaactctcactcatttagaccaatgaatctccagtatggtatccataatcaatgagcaagtaagttgattcagtgggtcaaaaattaaatattataacttatactaatacttacttttatctcatactttaaaatttatctttcgtttgcatgtaaatgtaaaaatacatgcaaaagttttaaaacacagccatagttatttgacatttttctcatcaagatttgggtctatgttccctccccttgaatttaaatttttgtataaatagagggtggccaaagagatgctatgtgactttcaaggctaggtcataaaaggtgatgcaggcttcaccttgtttactggaacacttgctcttgcaaccctgaaccactatgtaatgagtccaaacatcctgagatccccatgctgtgagggagcccaacctacaaggagagttctcatgtaggcactctggtccatcacaaatcccaggtgaacccagcctaagcaccagacatgtaagcagagaagctttcagatgatcccatacttcagcattttgagtcactttcagctatttgagatttcctgttgaaactccagccattatggaaccaatgcaaaacaacctctgtccacatttctgactcagagtacatgagcataaaaaaaaagtttgttgttttatgctattaagttttgtgggttttttaatgcagcattagataatttaaaatccaaacaatatatcaatatattagtacatttaaacaatttacagatagatttacgttgttacagtgtatacaaaacaaattttactgatggaatgagagcaggataaagaggcttgaagaccactgagctcaatagcagagagtgagccagggcgtatagaaactaaaggtagacaggaagaatgtgtaaacagatgggctaatgtgatccaaaaatagagctgaacatcagataggaaatagtatattggctaatcagtaatcataaatcgaattggcaaatgcaagaatcaaagatgtgacagagattaggtaaaacaaatccaattgcataggtagagaattaggtaacagatctcagagactttcaggtgacctagagacaaaggcaaaaattcagtgctgccaagagcttacacgcactttctcttagagtagaaacaaacttcaggcttgtgaagcagtggaagcaagtgaataaaagcaccacattgaaacaaagattgtagaggcagcactgagaaggctggcaggtaaggattttctcgaccaggggtaacctgttactttgtcttagggctctgcacatttccttgaaagtaatgagatataattcattgatcctacactcactccatcagtaaaatttattttgtatacactgtaacaatgtagatctatctgcaaattatttaaatgtactaatatattgatagattatgttgtttgaattttagattaatgttgcattgaaaaataccataaaatacatatcataaaattttacctattaagaaagtatgttttaataggtaaaaaaagttatgatgtttgcataactttgtgaatatactaagaagcactgtttttgttgtagtatattcacaaagttatgcaaatatcaccactctctaattccagaatattttcatcatccctaaaagaaactctatccattagcagtgaccacagtctctcctcccagctcctaccaaactcaaatctactttctgtctcttacaatttgcctattctggacatttcattataaatagaatcatacaacatgtggccttttgtgtctggcttccttctcttagcatacggttttcaaggtttatccatgctacagcaggtatcagtacttcactgatttttgtagttgaataatattctattgtactacattttgtttatctgctcatcagttgatggaaatttgggttatttccactctttggatattataaatcatacttttatgaatatttttgtacacatttttgcatgaatatatgttttcaattattttggccatacacctaggagtgcaatcgctagattgtatggtaactttaactatttgagaaacattctgtttttcagaggttgaaaattttacattcccaccagcaatgtgtacagctttcaatttctatacatcttcaccatttgtcacttattattatctattttttaaaattatagtcactctagaagttgtggtatctcgttgtggttttgatttgcatttctctgattagctaataatattgagagtctgttcatgtgctcattggacatgactaagttaagtttaatttagcttttgagatgtatgttttgtacagcaggtgataaaattaatgtatgaaagaaccatgtctgttttgctcacctttcttccctaatgcctggtgcacaggagagctgtgtctattcactgactgagaaattgataagacaaatgagtgaatggacaggcatcctcctttataatggtaaaggaactcaaagttgctcatcattaatggtgtgtgaaaagaataaaagattttgtcattttgtctagattcactttttcttgaaattctagctcagggtttctttccagtacaaaggatacaacctttaggaattacacaatgttctgtgtgtccttaaactggtcagtctttctcaacatatttcaataaagggagagaaatttatctcaaacattgtcaaatacgacagggttgtttgctgtggcaaatgatccccagctacaacattatcattgtgtgttcactctgggatctgccacacttggccatagagcccagagggggttatagtcaaagactcacctatttggtgcttgttcacccaccatctcccattcagttaaacctggcgaatatcccacagaagatgcttaatatcattgagagacagctgatttaggtctacagctggcctgtctctattacagatttcttgcttttataccacagcgtggataacccacatgatctgtattttcagcatgacacaatattcaagaatattgaaaatgattcagtcaaagagatgaccagttcttactggaggaccactttccttttatcatggctattgtaataaatggcattcttatacattctttgaaacaaaggattaaaaatgatcttttcttcatgcccaccagcagcaagagttacctgcttgccctacattaaaacaataatggatagtaccaggttgttcactcttttacttttaaaacttactgcagccttcaaaagctttttgctctttgatagaatatttcaacgtgatcagaaagaccaccttgctttgagatgaagtttaggctttgtcttttgagaagtatacccagcaagatggtaaagccagaaaactgcagttgttgagatttaatgcattgagtttgtttttctgttgagcagttgttatataaagccactctattaagccaggaacactggaggaactggtttatctttgacttttgaattttggggaagttccaatttcctacaacttttaatctttctatgttgctgatttgtaggaagtcatgttgtttcattatcacttgagatattagtatctatatattatgaacatgagcctgaatcctccaaacatttttaaaaagatgccagcatatctaatatgaagttgaacttgctacctcttatattgttttccctataaacacacagaatagtggatacccatgcattttccaatactgcctagtgaattgcagggtgttctttatataatctatcagcagtaaaacatcctgaaacatgtagtaattgcttaggtcaaataatgtaatatatctttgatgcgctgaaatagacaatgaagagtactagcttttcagtgatgcctaggtggaaatatacttccacaaatttctgttgaggccatgtctgaatgggttcactgaggggagacagagttacataccatgtatgttgagaaaaactcgacagtgttagctttctgctactagcgcttcatgaactattactattattttttttccagtggacccttattggaaaaatctcatgttcacattttcctgtaggaggatttagcactggattggatcaatgtctttagggctcattgatcaagagtttttcaatgattaaaagaatagttttctgtcatgcttatggtggctaagaaattacatttgactataagagttgctttattttttcacattctataaagtcagctggcactcaatagtactttggaacagtgactggatatttgccagtgatctgatgatgacatagtggaatcagaacattttgatactcctttgtttgtttgggatttcatcttcaaactccatcaatcaacatgtaaagaaaaagatggaaattcacattcacaatagcttactttcaactggcttgtactagtatctattagaatttttaaaatggtgtcctataaccttctctcaagagatgcttaagctaatggtatgcttggaccagctcacactgtcttgcaaagccagttggatgcatctcttcatgactaagaattcacttacttcaggttggcaacttgcagtcaccaatggatagagcattaacataatagaaattggcaaatgctacaaatcagggtgctactttcctccagagtgttagttgttaaacatttagtggtccatcgctgattataccacttgtttctaagaaaaactattaggagaggacctaatgcatgacattgtgatttgtgtcatatgaccttggtaatctgcagtcctaattttgatccctctagacactaaggcaagtattcaagtacgagtaattttttgggagtttagacaacagcagctggggacttgggagctgaggctgggaacagaaagcaaccaacacaagattcattcttaagtcagctaccaaggtgggcaactcctaaaactaataattgaagtcaacatggttacaggattcaagacaaacatattagaatcaattgtattgatatgctagcaataaacacatgaacactgaaattaaaaatgtaacatcacttaaaattgctcaaaaatacaattcttaagagtacctctaaaaaccatgtacagtgcttataaggtgaaagttcacaatgatgattaaggaaatcaaagaaaatctgaataaagatgcatactacattcatagattgaatgaatcaacacaggaaagatgtcaattatccccaaaattacatacagttttaatgcaattcctgtcaaaagcccccccagcaatttctttagtagatatggaagaaactattctaaaatttgtatggggagggagacaaactgagagggatcagtcttcttgattctaggaatttttaaagagctatagtaatcagacccgtgtagcactgacaagaggaatagacacaccaatcaatggaacagaatagagaatccagaaatagattcatacaagtatgcccaattggtattttgacaaatttaccaaagcaattcaatggaggaaaaatagcctttccaataagtggcaagtggtgttgaagcaattggaaatccagaaagaaagagagaaagaggaagagagagagagagacagagacagagagatagagagagagagaaagagaaaggaagaaagacaaagggaagaaaaagaaaaagaacctcaacctaaacctcacaatttattcagaaattactcaaaattgatcacagatttaaatacagtatacaaatctataaaattttagaaacctaagagaaaatctttggcatataagactaggcaaagcattcttagacttgacaccaaaaacatgatccaaaaaaggaaaaaattataaatgaaacttcaaatttaaaagttttactctgcaaaaaccctgttgaaaggatgaaaagagaagatacagagtgagagaaaatatttgcaaaccacatatgcaaagaaggactagtttctagaatatacaaaaagaactgccaaaactcaacaaaacaagcaatcaaattagaacatggtcaaaagacatgaagagacatttcacgaaagaagatacacagatggcaaataaatacataaaaagttgttcaacatcattaactattttggaaatacaaactaaaaccccaatgagacatcatagtgtgcctgtcataagagttaaaataaaaaaaaaattgataataccaaatgatggcaatattgtagagaaatgagatcacttgtacattgatgaatagaatgcaaaatggtacagttactctaaaaaacagtttgacagtttctttaaaaactaatcatgcaactcccatatacaaccctgcaattgtactcctgggcatttgtcccagagaaatcaagatttacgtgtactaaaaaacctgtatatagatatttataacagctttatttataatagcacaaagctggaaacaatcgggtgttctttataacgggttaaaggttaaacattcagttatatattcaaaccatggactaataatcagcaataaaaacaagctattgatacatgcaaacacataggtggatctccacagtattatgctgagtgaaaaaaggccaatttgaaaagttcatatactatatgattccatttagataacattttgaaatgacaaagttaaagaaatggagaacagattggtagttgccagagttagggagggcttggagtccaaagctaagtgagtgaagctacaaaaggacaacaggtaaaagtattcccttttctctgcagccctggcatctgttttttgttttttttttgactttgtaataatagccattttgactggtgtgagatagtatctcattttggttttgatttgcatttttctgatgattagtgatttggagcattttttcatatgtttgttggatacttgtatgttttcttttaaaaagtgtatgttttgctgggtgcggtggctcacacctgtaatcccagcactttgggaggctgaggcgggcagatcacctgaggtcaggagtttgagaccaacctgaccaacatggagaaaccccatctctactaaaaacacaaaattaggtgggtgtggtggcccatgcttatagtcccagctactggagaggctgaggcaggagaatcgcttgaacccaggaggtggaggttgcagtgagctgagatcacgccattgtactccagcctgggcaacaagagcaaaactctgtctcaaaaaaacaaaaaacaaaaactaaacaaaaaagaagtgtttgttaatgtactttgcctattaactttttggtgtgctgttggattcagtttgctagtattttgttgaggatgattccatctatgttcatcagggatatcaccctgtagttttcttttttgttgttgtgtctttgcaaggttttggtatcagggtgatgctggctttgtagaatgagtcagggaggagtccctcttccttgatttttttggaatagtttcagaagaattggtactggctcttctttgtatgtctgctacaatttggctgtgaatccatctggtccagggctttttttggttggtagggtttttttaattactgatttaatttcagaacttgatattggtctgcccagggtttcaatgtcttcctgattcaatcttggaaggttggatgtttccaggaatttatttatttcctctagattttctggtttgtgtgtgtagaggtattcattatagtctctgaggatcttttgtattttggtgggatcaattgtaacatcacctttgctgtttctgattgtgcttatttggatcttctgtttttcttgttaatctagctagtggtctattgctcttgtttatcctttgaaaaagccaatttttggttttgttgattctttgtatgattttttgggtctcaatttcatttggttctgctctgattccagttatttgttttcttctgctaactttggattagtttgttcttgttttgctggttcctctagatgtgatgtcagatcattaatgtgagatctttctaactttttgaggcaggcatttattgctataaactttcctcttaacactgctctgctgcatcatagagattttgctatgttgtgtctctattttcattttatttaaaaaatttttttatttctgccttaatttcattggttactcataagccattcaggagaaaatttgtttaatttccatgtaattgtgtgggtttcaaagactatcttggtattgatttatatttttatttcactgtggtgtgagagtttgcttggtatactttttatattttttaacttattgagacttgctttatggccaagcatgtctttaccaagcatggtaaatcttggaatatattccatgtgcagataaaaaaatgtatgttctatggttgatgggtggagtgttctgtagatgtatgttagagccaattggtcaaatgttgagtttaagtccagaatttctttgttagttttctgcctcgatgatctacgtaacactgacagtggggtgttgaagtcccccactattaatgtgtggccgtcaaagcctttcataagtctagaagtacttattttatgaatctgggtactccaatgttggttgtgtatatacttaaaataatgaagtcttcttattgaattcaactgtttatcattatgtaattcccttctttatcctgttttttactgttgctggtttaatatctgttttatgtagtataaaaatagcgacccctgctcttttttgttttccatttgtatgctagatctttctccaaccctttactttgagcctatggatattgttacatgtgagctgggtctcttgaagacagcagaaggatgggtatttttttttttaaaatcccatttgccattctgtgccttttaactgcagtgtttggacaatttacattcaatgtcaatattgatgtgaagttttgatcctatcgtgagattgttagctggttgctttgtagttcctactgtgtggtggctttataagttctgtatgctaggcacttaagtgtgtttttatggtagcaaatattgttcttttatttccatgttcagaactcgtttcatgatttttttggaaagctggtctagtggtaattaattcccttagtgcttgcttgtctgtaaaagattttatttctcttttgcttattaggcttagtttggtgagatatgaaatcctggttgaaatttctttttttaaagaatgctgaaaataggcccccaatgtctcctggcttgtaagatttctgctgagaagcctgctgttagtctgatggagttccctttgcacatgatctgacattttctctagctgcctttaagatttttttctttattgttgaccttggatagtctggtgactatatgccttagtgatgtttattttgtattgtatcttgcaagtattctctggatttcttgtatctggacatctacctctgtagcaagataagggaaaactttattgaattattaccttaaatatgttttccaggttgtttacattttctctttctccttcaggagtgccaatattttgtaagtgtggttgctttacacaatcccatatttcttgaagattttgtttattttaaaagcttcttttttctttacttttgtctgactgggttagtttgaaaggccagtcttcaagttctgaaattcttttttctgcttggtccagtctattgacaatggtttcagttgtattgtgaaattccttaagtaagaaaattcaattctagaagctcgaattgatttctttttaagatgtttatctctttcttcatttcctgaattatgttacaaattcctttgtgttgattttcaaccttgtcttctatcttactgagcttctttgaaatacatgctttgaattatttatctgtcagttctgagttttcattttggttagggacttttgctggagatttagggtgatccttttgtggtgtcactacattcagatttttcatggtgccaaaattcttgtgctggttccttctcatctggatatgctggcactgctaatttttgtaattattttcatgtgggtaggatttttttcctttgtacttctttacctgtaatattgtttttttttttttttccctttccctcctgtacctcccacaggggatgcagctatagagaatgggtagggtcttttggctttgcttctatagccctatgcacttcttttggcaggttttattttgggctgtgcaatttgactacaggtgcaatttaatccagatgcatacaaagtcagccattccttggtgatctggcagtgtggctgtgcaaggattttagtcttgggccagagattggagcacttgctctagaacagggtagaggcctgaacagccggaactgtggaacatgttccagtaggcaatggaattgtgttctcccccatcacaagcttggggtgggaggagaactgctacagctgtagtttctcctgggtggtgagacttgcagccaggacccccttggtgacctggaactagtctgcgtgtgccatttctgggtgccctaggctgttgccctgagactttggtacagcagaacactcttcactccacccacaggcagaaatccaggcatttggacacccacttggctggaccagcagcctgagttgccccacccttcttggacatagatcatggtgcggcagggccattgctgatccatgcccaggaagatctctaggcattcggagcacctgcttgcctggatcaacagcctaagctgtctcacccttcatggacatagattgtggtgcagcaggaccctctctgctccatgcccaggaagatctccaggcatctggagcacccactctctgagattaggagtttatgccactccccatccttatgcagagaatttggagccaaggaggttttccagctctatccctagacacttctctgtgcacttggtggttgctgactggattctccctcagtactggtgcattccgctcttgatattgggtttgggaaaatgtctgcagcttttcccactgtctttccctcacagcaactctgagcctctccccaagttagctccagggcttgggagaaacaaagtgttctcccttggcctcggttgcatagtccccagtggaaaggtgagttacagtggaaagttctctgcctttctcacacactgaagcttttctcacttttttcagccagatgccatcatgggggctgtttgctagcgttttcctccctggatctgtggtgcccttcacaattccagtggattcccattttccttctcgaattaaagctcacagagttgattcacacacacgattttgctttttgcaagtggctaaggcacgctagaagcctcaagtccaccatcttgggggaataacacaacacactcatttttttattgatttcaaatatgaatctctttcaatttatccagattttggtgagcagtgaggcttttgggaagacaacatatattttaatttggcaatggaaattgccccatttgtcaatggaaaattgttgttataatttctgtggttatttctactagttctcaatttcccacccccaatttctgtgttatctttctgagtcttctattatgtaaatattgtccctcctcaactgacccttgatgattttaactttcttttaaaataatttttctcttttttttccctttatatttgtgctattagtttgggcatttcatggtgtcttcctaaaacaatagccacagagtgagccaggtttaacataagtcagattagaacattcttcgtgcaaatcttcctatttttctgagaaccaaaaccaaagtccttgaattcacctatgaaacccttcatgatttgcctctggaacctctctggctccactttgcactactctcaccctcactcattccactctagctatacagcctctttgctctttctccagtgccccagcacaccactgccttatggataaattctgcacaaggtgttccctctccctggaactctatttcccctatataccctcttgatcccactcccttgtttctctcaaatctttatttgtatcttaatttcacaatgatgccgacatgatagtgccatttaattccaaaatctgcctccttccccagtatttcccatgtccatttccctgcatgtttatttgttgcctgccatactctgattttcatttgttcattatgtgtgtgtttattgcctgtcccctgcagctagtaggtcagttctgcaaggatgtgattctgtgtctgtgttgttcatttgtataactcacgccccttgtacatggtactagaacaaggcacatagtaggtatttgattaatatttgttgaatgaatgaataactttttgtcctaggaaatgaaattatttgttttacttctgactctttagttaaacgtattcagtaattctatttcaaatgtacataaactatttttcttgaatcgtttcttaattatagcttcctattttgttacagttgcaaaattatttcatattactctgaaaattgtaattagaatatttcaaagttcatttttccttaaattttcttaagagaaaaggttaatttaaatgtaaatttctaatttatttagtccttttcattttaaattagatatcaatatgcaataatcaagacttgtcagtgctagatacttaaataaaatttgcttaagcaaagaaagaattctttcattccccgctgatgtactaggaaagtccatgggtatatatgtcttcatgtatgtctgaatcatgtatttcactgtctgtcttttggataagctctcttctcatggttggcaggttggctaccaatagcataagattttcatctgtcaatgtgctaacttcagggttatgtgggagtttttttctgttagttgcagcagaataatttcaatgcagatcctgaatggcctagcttgagtcacatgactaatcttaagccaaaccttgtgaccaagtgtttgggattctctgctttttcaggcctgggtctcatgttcacaaggtagaaagaggtaagtgatgaacaacccctgctaaactacatggattaagttctccaaaaggaagagatatttttattactttaagaaagggtaggcaaaaactgtgcatcagacataatctttgtgcattttaagagttgaaaacaattcttatttttggatcagatatctttagttgtaatgctagataaggatacagaagagcttatcttcggggatagctactcaaatacaaccaattaactattttattaattactatttcaactaataaaagcaatatacaggatcttcaaactcctatctgggaagttatttattattcaatagaatcatcaggattccactaacttcatgacttaatatttgtggtctatcacaaatactgattgctgaatatgagattaaatttatataattagatgttcaaggtatttgttcttatttcttttttttattatactttaagttttagggtacatgtgcacaatgtgcaggttagttacatatgtatacatgtgccatgctggtgcgctgcacacactaactcatcatctagcattaggtatatctcccaatgctatccctccccactccccccaccccacaacagaccccagagtgtgatgttccccttcctgtgtccatgtgttctcattgttcaattcccacctatgagtgagaatatgcattgtttggttttttgttcttgcgatagtttactgagaatgatgatttccagcttcatccatgtccctacaaaggacatgaactcatcattttttatggctgcatagcattccatggtgtatatgtgccacattttcttaatccagtctatcattgttggacatttgggctggttccaagtctttgcaattgtgaataatgtggcaataaacatatgtgtgcatgtgtctttatagcagcatgatttatagtcctttgggtatatacccagtaatgggatggctgtgtcacatggtatttctagttctagatccctgaggaattgccacactgacttccacaatggttgaactagtttacagtcccaccaacggtgtaaaagtgttcctatttctccacatcctctccagcacctgttgtttcctgactgtttaatgattgccattctaactggtgtgagatggtatctcactgtggttttgatttgcatttctctgatggccagtgatggtgagcattttttcatgtgttttttggctgcataaatgtcttcttttgagaagtgtctgttcatgtccttcgcccactttttgatggggttgtttgtttttttcttgtaaatttgtttgagttcattgtagattccggatattagccctttgtcagatgagtaggttgcgaaaattttctcccattttgtaggtcgcctgttcactctgatggtaggttgcctgttcactctgatggcagtttcttttgctgtgcagaagctctttagtttaattagatcccatttgtcaattttggctcttgttgccattgcttttggtgttttagacatgaagtccttgcccatgcctatgtcctgaatggtaaagcccaggttttcttccagggtttttatagttttaggtctaatgtttaagtctttaatccatcttgaattgatttttgtataaggtgtaaggaagggatccagtttcagctttctacatatgcctagccagttttcccagcaccatttattaaatagggaatcctttccccattgcttttctcaggtttgtcaaagatcagatagttgtagatatgcaacgttattcctgagggctctattctgttccattgatctatatctctgttttggtaccagtaccatgctgttttggttactgtagccttgtagtatagtttgaagtcaggtagtgtgatgtctccagctttgttcttttgacttagcattgacttggcaatgcgggctcttttttggttccatatgaactttaaagtagttttttccaattctgtgaagaaagtcattggtagcttgatggggatagcattgaatctataaattaccttgggcagtatggccattttcaccatattgattcttcctacccatgagcatggaatgttccatttgtttgtatcctcttttatttccttgagcagtggtttgtagttctccttgaagaggtccttcacatcccttgtaagttggattcctaggtattttattctctttgaagcatttgtgaatgggagttcactcatgatttggctctctgtttgtctgttgttggtgtataagcattcttgtgatttttgtacattgattttgtatcctgagactttgctgaagttgcttatcagcttagggagattttgggctgagacaatggggttttctagatataaaatcatgtcatctgcaaacagggacaatttgacttcctcttttcctaattgaataccctttatttctttctcctgcctaattgccctggccagaacttccaacgctatgttgaataggagtggtgagagagggcatccctgtcttgtgccagttttcaaagggaatgcttccagtttttgcccattcagtatgatattggctgtgggtttttcatagatagctcttatcattttgagatatgtcccatcaatacctaatttattgagagtttttagcatgaagggttgttgaattttgtcaaaggccttttctgcatctattgagataatcatgtggtttttgtctttggttctgtttatatgctggattacatttattgatttgcatatattgaaccagccttgcatcccagggatgaagctcacttgatcatggtggctaagctttttgatgtgctgctggattcggtttgccagtattttattgaggatttttgcatcaatgttcatcaaggatattggtctaaaattctcttttttggttgtgtctctgcccggctttggtatcaggatgatgctggcctcataaaatgagttagggaggattccctctttttctattgattggaatagtttcagaaggaatggtaccagttcctccttgtacctctggtagaattcggttgtgaatccatctggtcctggactctttttggttggtaagatattgattattgccacaatttcagagcctgttattggtctattcagagattcaacttcttcctggtttagtcttcggagagtgtatgtgtcgaggaatttatccatttcttctagattttctagtttatttgcatagaggtgtttgtagtattctctgatggtagtttgtatttctgtgggatcggtggtgatatcccctttatcattttttattgcgtctatttgattcttctctctttttttctttattagtcttgctagcggtttatcaattttcttgatcctttccaaaaaaccagctcctggattcattaattttttgaaagtttttttgtgtctctatttccttcagttctgctctgattttagttatttcttgccttctgctagcttttgaatgtgtttactcttgcttttctagttcttttaattgtgatgttagggtgtcaattttggatctttcctgctttctcttgtgggcatttagtgctataaatttccctctacacactgctttgaatgcgtcccagagattctggtatgttgtgtctttgttctcgttggtttcaaagaacatctttatttctgccttcatttcgttatgtacccagtagtcattcaggagcaggttgttcagtttccatgtagttgagcggttttgagtgagattcttaatcctgagttctagtttgattgcactgtggtctgagagatagtttgttataatttctgttcttttacatttgctgaggagagctttacttccaactatgtggtcaattttggaataggtgtggtgtggtgctgaaaaaaatgtatattctgttgatttggggtggagagttctgtagatgtctattaggtctgcttggtgcagagctgagttcaattcctgggtatccttgttgactttctgtctcgttgatctgtctaatgttgacagtggggtgttaaagtctcccattattaatgtgtgggagtctaagtctctttgtaggtcactcaggacttgctttatgaatctgggtgctcctgtattgggtgcatatatatttaggatagttagctcttcttgtttaattgatccctttaccattatgtaatggccttctttgtctcttttgatctttgttggttttaagtctgttttatcagagactaggattgcaacccctgcctttttttgttttccatttgcttggtagatcttcctccatccttttattttcagcctatgtgtgtctctgcacatgagatgggtttcctgaatacagcacactgatgggtcttgactctttatccattttgccagtctgtgtcttttaattggggcatttagtccatttacatttaaagttaatattgttatgttgaatttgatcctgtcattatgatgttagctcgttattttgctcgttagttgatgcagtttcttcctagtctcgatggtctttacattttggcatgattttgcagcagctggtaccagttgttcctttccatgtttagcgcttccttcaggagctcttttagggcaggcctggtggtgacaaaatgtctcagcatttgcttgtctgtaaagtattttatttctcctttgcttatgaagcttagtttggctggatatgaaattctagggtgaaaattcttttctttaagaatgttgaatattggcccccactctcttctggcttgtagagtttctgccaagagatccgctgttagtctgatgggcttccctttgagggtaacccgacctttctctctggctgcccttaacattttttccttcatttcaactttggtgaatctgacaattatgtgtcttggagttgctctccttgaggagtatctttgtggcattctctgtatttcctgaatctgaatgttagcctgccttgctagattggggaagttctcctggataatatcctgcagagtgttttccaacttggttccattctccctgtcactctcagttacaccaatcagacgtagatttggtcttttcacatagtcccatatttcttggaggctttgctcgtttctttttattcttttttctctaaacttcccttctcgcttcatttcattcatttcatcttccattgctgataccctttcttccaattaatcgcatcggctcctgaggcttctgcattcttcatgtagttctcgagccttggttttcagctccatcagctcccttaagcacttctctgtattggttattctagttatacattcttctaaacttttttcaaagttttcaacttctttgcctttggtttgaatgtcctcccgtagctcagagtaatttgatcatctgaagccttcttctctcagctcgtcaaagtcattctccgtccagctttgttctgttgctggtgaggaactgcgttcctttggaggaggagaggcgctctgcgttttagagtttccagtttttctgctctgtgttttccccatctttgtggttttatctacttttggtctttgatgatggtgatgtacagatgggtttttggtgtggatgtcttttctgtttgttagttttccttctaacagacaggaccctcagctgcaggtctgttggagtaccaggccggccgtgtgatgtgtcagtgtgcccctgctggggggtgcctcccagttaggctgctcgggggtcaggggtcagggacccacttgaggaggcagtctgcccattctcagatctccagctgcgtgctgggagaaccactgctgtcttcaaagctgccagacagggacatttaagtctgcagaggttactgctgtctttttgtttgtctgtgccctgcccccagaggtggagcctacagaggcagtcaggcctccttgagctgtggtgggctctgcccagttcgagcttccgggctgctttgtttacctaatcaagcctgggcaatggcgggcgcccctcccccagcctcgctgccgccttgcagtttgatctcagactgctgtgctagcaaccagcgagactccgtgggcgtaggaccctccgagccaggtaagggatgtaatctcctggtgcgccgttttttaagcccgttggaaaagcgcagtattcgggtgggagtgacccgattttccaggtgccgtctgtcacccctttctctgactcagaaagggaactccctgaccccttgcgcttcccgagtgaggcaatgcctcaccctgcttcggctcgtgcacggtgcgcgcacccactgacctgcgcccactgtctggtgctccctagtgagatgaacccggtacctcagatggaaatgcagaaatcacccgtcttctgcgccgctcacgctgggagctgtagaccggagctgttcctattcggccatcttggctcctctcttcattcttatttctataaacccatgctaaacaaaatttttcctcgaggacaataatgtctaagttgctgataactgtcagaaacaaacactataactaattcattttaaatcagtaaagagtaaagcaagtaacataataacataacatgatagtaatacttctagtagtaataactttactgttaaatattcttaaatatttcaaaatattttcacttgtatcatctaatcactgcgtatctcatttcatgaaaattgacaggaaaactgaaggtcactgtgagtaaatataacatttatacataccaccacatagcttttatcatattgtacaagatatctttgtttttatctctatctcacctgttaagattaggagctagatgaagatgaatatcttgtattacatttttttttatttgcaggtcctagccagtgcctggcatagatcagatgatttttcccaaaaaaagttttcaaaatagaatttagttgtctgtggtctcaaagctaagtcacatatggcagggatgaaaaccaagttcttgtgcttttcaatacagtatgtagattgctctttgaaatgcaatcaacacatcacatctgcttttaaataagtgaacacaaaagcctggagtgggtctagtgagatgccatccaacagagtgtgcatcaggggtcttggcaggaagcagatgacacattcaagctgggtgattgatgaaggttgataaaagaactattacaaagtttagagtgaaaaaacaagggatgcaggaccctgcctgagccacataataacatcagggagctactaccactcctaaacctgaagaagtgaaaagaagtggctcccagaacctgtggagagagctgtgagggcaacttgactggagcttgacagtagataggaccagcagatttactgagatccagccggcagggagccaaaggaataaatactctgacatcacactccttccttcctcccatctcatcctgatgtaccctttggctgaagccaccagaagaaagagagcaaggtacccctggtaccttgagatattcattcagcttagcatcccaaaggctagggcagacagcagggtagagaaggacggggtcaacagaagaccttcaacgtggagagtttgctacctcaagccttagtgatagaagtcaaaattcacttgactacttggcctatgcttgattggagactgaggaagctgatgtccttggaaggacctggtgtgctaactgggctgctgccaatctttggaagagtaacttgttctcgttaagaagcataaccagatggggtccaaggtttaacttcccactttcatggtgtgcaactgtcagttgtggctacaatcctgtatcgcagagggttgcaggctgtaattttgtgtccaagaccttccagagaacaactagcatatgctgtgcacaataagtacaggctcgatctagccacactgctagcatcaaagcgtattcttcattaattgaatgtgacagtgcacttacccctcctttttgagagaacaaaatactgattcaaagattgttctgactatgaactccaacaacacacacagtagaagccaatgaatcagtttggtctatttgttcatgaatagattcttctgtgtagtgtatcacagtgagttctaacttgcaaagtcttaacactgctcactcgagttaagccagcagtagacttccctttaacttatttggcatggcttttcctcttgggccatgatgatctcagctacattagtgtgcaacttgtacacagagaatgttaaggaaatgacctgaataaatctctttcaagtaaagggccagactcaggcttctggtatttgtgtctaaaaactgggatgaaccatatctggttccatcattgtatgatcctggtgacctcattagcccctctaaactttggtatttccttctatggagagagacatttaacttcccttcctacatcctcagggtttggaaatctcacaagtgccaccaaattatgagatagtataaccatatagcatacagttatcaaatataaatattaatactaagtatctgaaaacatgtacatttgtcttttgttttctgctgaatagtgcctgggactcacaaggtatgtctttacactagactaaaggaaaggtctttaattttatgaaaagttgcatgaaaatggaaaagtcacttacttcttttaagattcaaatttcctatgtaagaaataggtatgatgagaatatttacctccagaattttctcagaaactaaaagaaaagaataagtacttaaaaaaatcaagtcataaaaatgaaagttgctcctgaagttactgtaggtgatacgtcaatttattttcatgttacttaaatagtgtttgttacccctgactaatattagagtcaggatcccagtctataaaaatggaaggtttcagaatttcaacaaagaacatatgaaagtcatgacctgaataactttggtaaagtagaagcaaactctggatttgcaaagagaaagaacaccaaagaactaatggaaaacaaacaaaaaagtcttttaaggcttagtgagattttggtttaataattagtgatatccatatgcatatcttttatctattgctatgacaatgctgtgttataaccaccccaaaactcagtggtttaagacaacagacatttattaccgctaatgagtacatgggtcagatggaccagtcttttggtattggctgagcacactcacacatctgcagtcagatgtggggtggaaaggcagctcccttgaacttggctgggctctctcacatatttgggagtgggctggccttaagcaggtctagattaggatcagctgaaatgactaagcttttcttctttggtttctcacatccctccagcaggctcgctagggcttatatccttatggtccctgggcatggttgaggcatagtctcagaattgacctatttcactttggcaccatccttctgaacaaatcagttacaagaccagcccagattaaagaagcagccaaaaagactcgactgctgaatgggagtaggtgcaaaattacattgcaaaaggtgtagatacagggaaaggaggagaattagggccacttttgcattcagtctaccatactattctacttgaatttccttatgagcagaagtcaaaggcttataaacatctggaaggcttcagaaatctggacactgctgcagcagcatgccaccataaccggcaggctgtgtagagcaagccaaatttgtacttagagggatctataagacttgccaactatttttatgaatgtacaagtttggctgacatacattttctaatatctgaaacatcccatttgtgccacttgagcaaacaaatcagacacaataactggtggtgtgatccccttctcagccatccttatcacaggagaattaagttgctatttattttacatatttgatttaatttacagaatacatttatgtcttttttaatttttgtcttacttgcttatatttttaaaggaaggaaagttatctttacctactcatatttggaaacatggtccctaatacaaagggtagttgtatagcacatttactcgtatttgtaaacaccaaaatagtatgtggggggggaggagtacttacaattcttcgcttctgcagctgtagacaatttcttcatttaaacatggagttctaaagaggaatttagatcaattacaataatattttcttgtctggccttgttaataacaaaatttttgcttgcataaattgcatgcagagaaaataggattaaagaatattatggtgaaaatgaaatgaataatgacaatggaatcacttaaatcactgcagaaaaatgtaaaattatataattaagaaagctataaccccactgattctttcagatatttcagaatacagccaaggcagcttctcagccacggtcactcccaagataagatttgaagttatgaaatgtagcagtcatgcatttagaggagttgaacattttctaaccagtcatgaagtgagaaaataatcttacatgttatgcttcaatttgcaatgtttttactagttctagtcatgatttaaagcatcagaatattgtatgcattatgtatgtagcaagagttacatgggcaaactactgctacttcagcagttcattttccagagtttgaattaaaatccttgtttctctcaatttttctttctgtttgcctgctgaattgcttttgagtccaaaggcccgtgccaatctacatgctctgtgtagagattaaaatcttgtacaagccttggatttaagagttctgttttggcttttatctctccaatgttactaattgtctattttaacctcctattcactgaattcatgtatttatttaagtagaatatttatagcattttaaaataataacaataatgtttaaatcttatgttggagaaagctaaaatttggggttaaatcctggctcctaccttactaattatatgacattgataagggtttacctcccaaaaccttattttcctcacctttaaattggagataataatgttgcttaccttaaaagattgttgtaaataatacaatcaggtagcattcgtaaagtaaacatgtagtaaaaattctataaataatgatagccagaagtcacactttaaaacacaccagtatcttaatccatggaagaatctttgctagggaatatgaccgacataagagaaaaaaaactaaaaatatggatatggaagttactcatccaaaagcccagtctgattatcctacagtataagccacatgtaatgagccctgtctatgcaccttaagctttcaatcagcatttttctgttgtttcactttttgaaaaataaaccggcagccaaaaaatcatcagatatttatgggaagtgtctaattgacacttgacatcgtgatgacatgatgaaaatcagaggcaaagcaagcagcagggagcaaccaggtggagcaaagaccaggtgagacaaagaccagccttcagaagactttaaaaatatacaaagtagatcaacattatggagacaactcgaaatgagactagggtgctataaaaatgatcattcagagaacaaaaacagttcttcaaaattaaatacatgatagcagagaggaaaactgaagcagaagagttgaaagataaagttagaagatgccgtagagggtatagcaaaaagataaaaacatggaagacaggaaagaatatataataaaattagaggaccaatctaggaggtctgatatccaaaacatgagaaagaaaatgaaggagaagaagtaagcaatgaaataattctagaacatttcccagaattgtaagtcatgattttctaaattaaaagagcctaattaatgttcagcatagtgaatgaaaataacccaaaccacagtccaaaactcacataaaatcagaactctggggacaaagaggaatagcaataaatttccaggtataaaatcccacaaaaaccaaacaagttttcatatggaggatcaaggaatacaactagacttttcaaaagcaatattgctaaaagacaatgggagaaagaaagccttccaaattttgagagaatatgatttctaaactagaatgtttctgtttggccagtgtatcaattaatcatgaagggcagaataaaggcattttggtacccgtcagctttcaaatattttacttcccttgcacaatttctcaggaagccatataaagataaaacccatgaaatcttgttgggttgagcaaaaatgaaggcaagaattaggagttccaatagagccacgagacgaagggaattctcagcctgatgatgaaggggacctccagaagatagtggtgcagagacccagaggacaaagggaatccacactggagcagggcagaagtctccagaaaagacctcgtccagaaggagagattgaaagaatattcaacctgtttgcatttatcacaaggaggctaactctgccttgaattagtggtaaggacaaaaggagatgatcaaatgataaaacaaagcgtgcagaacaaaatatacaggaaacgaaaggtaattatggcaactgcataattcagactcacctgtaaatatatatatatatttataaataagtatatataatatatatataatatatatacccttatataatactaaggaactatatatagtattataattatatatcatatctaataattacaatgtgaacatgaaatattgagctagccaaaatgaagataaatccatctttatgatggtattataagggcaggagaaagagggagaggatggtgaaaaaagacatttgtcgtcttctataccgagaaggcaacagataatgaacagagtgcatcagtaatcagcagtatattattttgcaatatatagctaaatgccaaagaatcagctagaataattaaaagtatttgcacctaaagagagggaagttgtgtaggtgtaggataaaaagctgcttctatttataagtatctttgtagatttatttgattcttaaaagttgttggtataatttgatggaaataaaacctaaacgttggaaacaatgaatctatgacattactcttattagttcagtgttttaaaaaataaagacaaatatttttccaaataagcaatttgttggcatttttaaacatgaacatattgacatatagacacacacatgtgtgtttgcgtacaaatttacatcatcatcatacaaagcaactattttctaaatgtaaaacatatttttttctgtgagtactgcagtgcttgtctaacctttatctgtagattttattgtacattcttgagaacccaaacctgttaaacaactttacagctaagtcttggcagcaggaaagcagtgaccaacattatcctctgcatccttcccctggatctattttattactaaacatatatacatatatatatgtatatatttggaagcatgcatatgtatgcttccaaaactagaccaaaataataactggtctcattaaaatatataaaagccttcaactaaatgaaagatcaaaaattaaatatgtgtaaatgagacaaataattacgtaaacagtctcatgtttaaaattcaaatatcaagtgttatcaacttacaatcctgtagtgccatttttctaagtagcactggtcattgtactgtgaggccaaaaagtcaattctctcaacattcaggcataaaaaagggaaggcattaagataaattaactctctgagtatagaaattaggcagtgtgttagctttgtcatgttgttcaatcttaatttccaccacagcacctcaaacgatattctaacatgaataactaagtgattagtatgtttcccatgcaatgtggtatcaacgtagatatttttgcctgacctcaatagcccatcaaagctcagcatgttactccagtaaacagagttggtctcagctattctgtaaagcataaacatctttggaaacgaggcttgatatacatgcctagaaggcactgtgattattttatgtataataaaatagtcaaattttctgcaatgccaagatattctttgataagaaattagttcctaaggaagctggaaccaggatgccgggacactagagaatcacctacctgactgtggcgctaatagatcccacataactccaatgtgcacaaaaccccctgggcttctggtacctaaggtaccctctgatacagtaggattggagtggggtccaagattctgtatttctaagaagctccaagcaatgttgatgctgctggtctatggaccacacgctgagtaaccaggcactaaatgataccataagctgctgatttactacattgccaaatttcatatgttggcacagaaggcagaaatctaataatagattccattagattttctatcacgtagtaggaactcagcatattttgggtaactatactacccttggaaatgtatagggaaatcctagagaacaggtcttagctatatgtaatgagagctaggctgttatctgtatatgcttggtgcagttttgcatttacaaataatgctaatgagaagtgctattcacagaatttctcaagtattttcagagattaatttgcatagttataaattagatgtcccaaatattattttatgggtaacgtgtattttgcaagatgatttccttagagagagagagagagagagagagagagagtgtgtgtgtgtgtgtgtgtgtgtgtgaattagctgttgccaggctatttttgttgctacatggttgttatgggccaaaatcttatattcacttatctttaactagtttagtctgttgcctatcttcatatataaaacatattctgcttcagatctgttgtagtatgtgggtttacttgtttatagtatagtagtggaatttactaaagctgcatattatatatcacagagaaataaataaatgagacttttataaaacagtaaatgctcaattattttagggtagactgtgaaagtttcaagaaatcttgagattacttcttcttgtaagggttggcaaactataacccatgggccaaatccagcctgctacctgtttttgtaaataaacttttattggaatacagacacactctttcatttacacattgtctatggctgtttttcatctacaatgggagagttgggagagttgggtagtaatgacggagatcatacggcccacaaagcctaaaatatttcctctctgacttttgctgaaaatgtttgtccatcctgccatacaactaaagattatattctaataccttaatttgaaaaggtaacaggagatagctttataaccttcacttggtaagattagaattagactgtaggatgattacaaatcctatcttttctctctctttggaagatgcagtggcaatatatctcaaatcacagaatagaatctgttagggaagggggagattctcttcattgcctttatttgcaacttaatttttctttaccactccaaaaaaaggggactatttgctttttttttttttttttttttttttttgagatggagtctccctttgtggcccaggctggagtgcagtggggctatctagctcactgcaagctccgcctcccaggttcatgccattgtcctgcctcagcctcccaagtagctgggaccacaggcacccaccaccacacccggttaattttttgtatttttagtagagacggggtttcaccgtgttagccaggatggtctcgatctcctgatcttgtgatctgcccgccttggcctcccaaagtgctgggattacaggcgtgagccactgcgctctgctgtggggactatttgtttttcaagtgttttcagttatttttgtctatagtcaagaaaaaaagcgggtgttttatgcatcttcatcttgatgatttgaattttttactacaattttaatttaatcattttccaagttatttatcttttctctatttgtaacataaccaatgccatctattgcttgacttagctgttctttcctgttctttgtacatgtttgcatatgtgcatttgatatttaataggtaccaatgggcataagatatagtaagggaatgtatatacatttaaaacttatctggatttacccaacatacatagatacaatttgaatttaattcagttgattcaaaactttagtgtcttaaaccactaacctagaacctctttttgtgaatgcaaaaaaatcccagctcaacattattccttatctgtatgattcagtttggcattacaaaactaggtcaacaatgatgtaggattatttacttatttcagttttcacagtctgagagaacctggaataaatttgagtcatgctatttagttaaatgaagaatgaaattgtccaaagccttgttcatcaattccctagcatattataatatcaacattaacaaaaaagatgtgtattcaagtgagaaaaacctaaacttcataatagagtatctgtaaatcaccatagattgacattcatggtgacacctactttaattatgtagctgctacaatagcattgggactaatttttaaataaaatgcatcactatgtaagttccttcgttacctacttttgcaaatactttgagtacaattattctccataaaaaccaatatttctatactggtcctggggaggccaagtggggcaaaattatttcaaattttggaggaatgaatgagaagcagcaatttattcaggaacagaaccttgggggaaatacttgaaaaaaacaaaagacatttttcccaacctgctggtgcagagcttagaaaggcaattgaagaactgatgtagaacaaagcaatagtgccagtgttcggtatttgccgctatgtcagtgagagttgattgtggttgcataggatggaaatcgctaaattataggggtttaaacaagctaggaactttttttctgtcatttaaaatctagatgatccaggatggtgtggtggtttggagacccaaggatttctttcttctctactagtctagctcctggctttcacgctcaaggtcacctcctagctggaacttcagcccttgagtggccattccaggccacaggaaggaggaagggggaaggtgaacaaaacacattgtgacttcaaattgggagtcctgctactgatggacactaggaaaatagatattggatggcaactagaaatctctaacacagctcctttgaaaagtgactttaccccctcctttgtatgctataaagaataataggaatagttataaccaataaaaaagtcaaagagtttgcttttagtttcctaagatggtgccactacagtgaaatgagggaatactagaaagagaaatcttgatgaagcaaaatcatgttgttctttgttaaaatttctacaaaaatgtgaaaaggtgattattcatattttatagttgtcactgtatcggtaatggtggttgaagtctttgtatacaaaagggaggcactgaagtgtggaatttaactccagcaaaatttggaagaggatttttaccccaaacaaattgaaaggcaaaaagatgttttttaaaatgcaaatctgtttacagtgccctgaggtgaaaataaaatgaaacttcctttaaatcctgttgcttacaacaatagatatcattagagacctaaagctcagtgattttatctgaagtgagagagaattgggggtatgctggtgtttatttttatagaacagggaagatacatatctggaagataaactgactcatgaagattatatatttacactggtgtgtctcagtcactatatctgagggcccagagatgacggagaaggaaatagggtgaggtgggtgcttcttgccatcctgaggcatcatttccgcagtcttctctgcaaacacctgcattttccatgaaatctggattgtgctgagagtgtctctccttaaacattttttggatctgagcttccaaattctttttctgaaattgcgtttaaggcgatcagccagatttcaatgaaagcctttgctttatatgaagcataaagtagagcttaaatgaacagaaggtcatttgtcttgtttttcaaaaagaaaaaaaaaacctcaccatttttgtagcataactaaagcaatctgaaggcttttttcttttgtgtgatagaatttagagaaacgtactgtgctatcaagaaagggttcaaataagagcttctaaggaagatgttcttctcaatgtgtgggtgataattttaagttgtcttcctttgagactctgcctctgtcagtgttttacttgataacagaactcactgagtcagaagctggcaatttcatcatgatgcattttcttatttaccattcaagaggtgtaagccttatctcttatattaatgtgaaaagtaatgaaaataatgatgccaaaggcatttaattcttggctctaatactttataagtgtgcctcttgttcacataatttactgggcaggggaacaagtcatcagggtgacctttttccatggagttaatcagggactcaaactaacagaagctctgccttcttcagtgcgtggcttccaaggtcaccaccaggatcactttcattctggccagccaggcagggaagagcatggatcagcacatatgggagggtttgacctgccaaaggctactgactgtaacccagatgtggttattataaagctggttctgggtagtttttctccatatctctcttatatcaaaaaaggtgagttaaaggagccctgattcttagatgcaattagaactcatttattcatgatggaaaagagcttttcagttctagaaggttagagacaaaaatgaatatgattaaagtttatagaatcaatgcagccaaaaagaagtttactaaatcacagaccacagaattagaatgctgtcttttaagactaaaagagttatttagggcatagaaagggaatatagtagaatttcagaataaccatatgtgtgttaactactattgattaccgctgtgacagggacttagatatatgatttcatttaatctttgcaatacctctttaagacagcttactgtggtggttaaatatgtaggctctggggtcaaactgcctagtttaaattctggttcactcacttactagctggaaaatgttgaacaactacttaacacttctctgactcagattacccagctataaagtggagataatagtaacccggctcctaggggttaatatgacagtgaatgcattaaaaatgtaaaaccctgagaagagtatgtgacataaaaagctttgacattattattatttctccatttacatattaggaccttgtatttcagaagagataagagactttcccacggttacgtacgtagtaattggtagaactggctgttaaaagatatgtctattcaaatcaaaacactgtccttcccactgtggcaggcctcaagtgagttatgagctgacaagagactggagtacataccacaatctagtttctagggaaattaggactatttatattacactgtggttaaaaggagagagaaactactcatatctgccttataagttgtagaagtatctaccatggtagttaagagtctaggttctaaagtcagacttcctaggtctccatctcaattccgaattttgtaactggaggaggttaatccatcctccaaactttagtatataaatcagtaaaatagcatacaataatattatctaccagatcagctgagagtaacaataaagcttaaataataaagagatttattatctcactcattaaaaagtctaaagaaaatttaaagggtttaaaaagctcatgaaggaccaggtttctttgcatctttcttgtcagtgtcctctttacataacaatatgagacagagaaagagaatttccctgaagacattagtcagaactgagcccctcatatagctcttaaaccagttacagacaaaggggaatggaattattgacattagtttaggccaatcatagtttgttccttggaaagagagaggggccatgtttcctaagcatgacgaccacccaaattaagtcagggtttgcttacaagaaaaagagggtggagagtggtgttgaataggaagggttatgttttttagtgtctgggaagtgcttagcttagtgctctgacccacagtgagtgctcaataaaggttagctttgccagctccctgaggctgacattcccagagggcaattctgtgctctcacaaaaaacagaccttcctattgtttcaaaaaacagtacacagcaccgaacttgacggatcacaggcctggctcacacaattttggatttcttacagatccctttgcatagcaaaaatctccacacttggacacaggaaggggaacatcacacaccgggaactgttgtggggtggggggacgggggagggatagcattaggagatatacctaatgctaaatgatgagttaatgggtgcagcacaacaacatggcacgtgtatacatatgtaactaacctgaacgttgtgcacacgtaccctaaaacttaaagtataataataataatttaaaaaaaagaatgggaaaaaaacaaaaaaactccacactttagaaacatttctatcttgtatactgaacaaaaggtgtggaaaatgagggagttaaaccatgctgcttcaagcatcatgctacatgttgaaggtatttatcctgtagttctcctttaacaaactgcgtcattttgctggctgaagaaactcttgcagcccatgtttgtcttgaagacaaatcctgttcagatttctacagcgttctctcctttttacgtccacgttcacagcaacagctgggaggaatcagggatgctagatgaaatactcaactatccattgccaataatggtggttaccaaatgactcccaactcagtgccattcaacaatgaacgtttattgtcatgttcatgagtctgcaggttggctgagtctgggagatctaggatggtttctactggacttgcttccaagctgtaaatggggcttaggtctgtcctgattgtctccttagatcagaggctccctgaggcatgtttatctcatggaaatgataagaaacccaagagggaaagcccaacctcaaagcatattttgagcctttgctaatatcacatcttcaaacatgccattggccaaagcaagtcacattgtccaacatcaatgggatggataaataaacagggtgtctagtaaaaactgtaaggtcacaaagaaaaatgtgtggacgcagaaaggagcagggagcagagagctatgatgcaataaactaccacaggaggctcaatctacttcttattttgcttagagctcattgtaactctccaatctcctcttctagtgagcgcagccctgtcttgccttcctaagccactgtgacaggtaaaaactatttggccaataatctttccagtaaataacaaagagatagaaggagaaaaggaaaagaaaggaaaggaaaggaggaaaggaaaggaaaggaaaggaaaggaaaacaatttggtatgatcagttgtaaggacaattgagaagttctggagccctggaagcagagtttcattgcagtactctgaagtagagaaaatcgacttgagacggtgactgataccttctgtgaggtaattagcaagccaaggctgctggctagagggactgtggaccattcaggttttagtttagggacatgtgatcaaaatgaaaccagtcagtttttcatgaaattctttgtagcaattggcttccaagcacaaggcaagaccctcaaatgacagcaagagtcatgggtcttgttcaccaggttatccatggtgattacaatagtggctagtatacagctggctaccaataagtatattttaaatgcattgaaatatttaatagcaaatttctgtattggattttggtaatcttttgactgagttcataagcattgggccttggagtcctgagggcagagaacagggagaatgaaggattaagagaatgtagtgtttctctccatttttctctcttcgtattctttcttctttttaaaaatcaacctttttgagatataatttatttaaaacaaactgcactcaatttaggcgtacttacagaacttacaagttttgataaacacacacacgatatagaacatttccgacatgctcatcaggtgctcgtagcccttccctgtccatctctacctatccctggccacaggcaagctttctgtcaacatagaatatcttgcctattctgcaattcctacacatggaatcaggcagcatacagtctatcgtgtccggcttcttttacaaagcttaaagtcgcgattcatccctgatcttgcatgcccactcatttttattgtggaatagtattccaatatttgggcataccacagtttgtttatccattcacctgttgattgacatttgcaggctactaagaagaaagttcttcacatcactttacaagtccctgcagacttgaacgttttcatttcttttggacaaatacttaggagtggaatttctaggttgtatgataagtaaatatcttactttataagaaactattctccaaagtggttttactattttatattccctccagcaatgaacaagagttccaagctatttctctctccgcccccccacctcccgcgtgtgtctctctctctctctctttctctctctcacactcactcactctctctctccctctcctctctctccttaataaaaaaaaaaaaagagttccagttgctccacatcctttcaagcatttggtattaccagtctttaaaattttatccattctggtcctcctctttcccttcttccctccctccctccctttctttcttgaattgagaaatgtttgtggaaggagtgaagacaaacattcctggacctatgttcctaaatgagcaagtttctattaataagactctcccccacccgccacacatcctacacactcaaggagaggagcgggagagggcaccctctttcttcctcggaaaataaaacctttgctttctttaggatgggctttctgtctcgaaagcacaacgtaaccgtttgcccgggtttcaagatcagcgcgctgcaaactctcaggcgcggccaggtttcctcaaagagcctctcaactgcgctcttctctgctgataaatgataattctcttcaaaaagctggtttgtggctggcgctggagagctccagctagagccaaaagccaggggttgcctctttggttcctcccgatgggccccttttcccagccagttgggatccaaagacgctccggagctcgagcccaaattcccaagaaaaccccaaagagcgtaaggctcctggggacccctagcacctctgcaaccagggcacggggcatgctcagagcgaatgcgggaggcaggcgttggctgcaatggggctcgggagccaggaggtgccgctgcgtccccgcttcctggcgcctgacccagcgtgcaaagttgggctgggagccgcggggggaaggaaggacccagcgagcgagggtggcggggaaggggggcgggggggaggaggagggaggagggaaaagagcggttagggggggcgccgggcgtgtgtcactcgctctctccctctgtgtatagaggatgtgctgaatggtgcgctttgaggcggcggcggcggaggagcagaatccgccgcgactggcagcctcggctgaccggctcggcttctcttcgccttccgaggctcctcatccaccgcgggctccagacctcgcgtcccgcccggggcatggccgggcgctgcgcccccgcgcgctctgcctgctgagcggcgccggagggaggtgcggaggccgggaggccggggaggccggcggggagcagagtcgagcgcctccggagcagagaaaggagcccgcgccccgcgccccgcgccccgcgcacggtccccagtccctgccgcgctcgcccgggccgcccggagcccagatgagcccagatggccggggctcaacccggagtgcacgccttgcaactcaagcccgtgtgcgtgtccgacagcctcaagaagggcaccaaattcgtcaagtgggatgatgtaagtattggggcggcccgagtcggggcgctggctcgggcaccgggcagggcgggcgtcgtgggggtggggcaaggggcgcgttatgcaatgggcgcactgggagcgggcaggggcagcctcgggcgcacaggttggcatctgccaaagcggatgtccaagggcagaagctttgcgcgcgctcctgtttcatcgggcttcagtagttgccatcctttctgggtctggcaggcgccccctgagggtcttacatcttttgggccagtggagagggaggggcaagctttgcctggtgacaggtcctgagagttcggaaagtagggagtgtgaagttgggaccaactggaaagcgcctggtgtgaacaaatcgcgtccctctccgcctgcggacgcaccccctattacctcttttgcccgatttcaagaaggaaggacctgaagttcaaaacactttagtgattgcgaaccctcttggcgcttttgtgggagccaaggcggcggaggacacaacggtccagccaacaggtggtcgttgatgccaaacttcagcgcctggctccggagtgagggtccctgaaaagggctgcggggacacatctggggagggcgtgaacagaatgggggcccttgaggggtcctggagggctcatgggcctgcaggcaagtggggagggctgacttttgagaactgagctgattggagtcttctgcctgaaatagacaggttgagagtttgccccacgatttacctgcaccgtttgccaggtagggcagagcctagcccagcgccggggtctctaatgctttacgagcggcccagaccccaggacttcaaatgacttccccttcccctctaccccagttgtcttcaaaacacgtaaattagttatccagctgaaaacatgcgaatcttcggatggagaacattatggtatcagttttatgtcctgggtgtcattctaaaggttcgataagaaaaacctactgaaataaacccgagttgccaggctctaagcaaatttaagtccaaatgactaatacatctcttaatcagaaggaattataggagaatgaggcgttcttcttgccgaaaagattttccacctagtaaattatagcctgttatcctctagggtatttttctttaatcttcttaagccattttccagtgtctgaaaacaatttaaatattccaggtagtgaatccaattacttagctgagtgcgtctgtgtctatattttgtccagctggaagcgcaaacggaacttggagtatgaaccacagcttccttgaaagctcgtgccaattattaaatgctgtaggcaaggatgtaaacatacatctttttaccatgggcttcacacttttcttctttctgttccagtctaattgtactgaatgtttctgtaaatggaatagaatctaaacaataaattcagacgcagattaaatgctttgtgtcagggaaaaaaaagacaaagaaaatgcagttcagcaataaacaagacggtcttgcccattttgagatccttgaatagagaggtgatgtgatgatggatttactgagaaagagagtgaagggcagaggaaagagaaagagactttgcagaatttagaaaagggagtttcagcgtaagctctggatttgtatacagtgatgattctaaactgtattttaaataattctctataatttcttgtttgggagagaatagccaacatcacattgagaatgaaagtattctatgaaaacacattttggtatatccaggtagatgactttcattatgtgcatttctgtaacacatatttcttgctcacctattactgccaatcctagactggattctggggtggtgaaaaaagtagacaaaatccctgctgttacggaccttacatgctaggtggaggagacaaaaatcatcaaaaacaccaatgagagagagattgggtgatgcattgagggtaatagagaggacgttagtgaaataccaaccaaagaagaagttgaaaagagctccttctgagcattgcagcagtgagtttccaaggaagccctcctgaaagaaaggacatagtcactaaggagaagaccagaagaatttcaggtcttttttaaaaaaaaaaaaaaaacctagactgcactcaggagtcaagttatctggaatataatgagctatcttgcaggctctttggttctctgggtcttcatgctgatcagtggactacaagggacccagcctttcttaaggttgcctttctcttccccaggcatcccttttctactcttctcagctcgtatttgcccttccagaatcaagccagttcaagttatctggctatttatattgtaccttagtgagacagtgtgttgaagacaaaaaagaaccagatcttgaatcaaaggcctgagtttacctcctagttctttcaccagtaagctgcatgactttaggcaaatcacttagcttctctgtatttttgctgcttcttgtgtaaaagcgtggtaatgttacaggacattcaaaaatgatgaatttggggctgtttaggatgtgaagaaattatctcttgttcctgaagtgattaaagcagtataatcactggtcttgttgtcttgaccaccatatggaatggaagatgtcacccagaggttgcagtgccatgcataatttgctggccacctaccaagtcacagtgaggctgtggatgctctaagggtggtagtcgaaagctttaacataggcactaaacaatcacaacagacagcaggggggtaatagatcctggagataccctgttgtaccagggccaggcgttaatatttttgctgcttggtcatggggaggtctgggagtccccagggtctgtggatgggtgggtaggtagctggagtttttttgactatttcagtattttaaaactcatggtgtatattgtctgaacatcaaggctatacctgtccttctgaacttggcatgaagataaaggactgacctaatgatatttaaaaaattcaacctcatgtctttgcttttgttttgcatttgtctgttagcaggctctggtggtaggaggtgggtgtaaaggactatgggtatttgtgggagaattctggtgaggtagacagtggaaggagagttactttcttgatctaagctagggagcttgggagattgtgagagaagctcctctctcttctggatcttggccttggtctatattgggcaggacatggagagaaagagcaaggactgtaaactgtacaataggacccccagccactgatttggccctgttttccatgcctaagcactctgtctcactgtcgcacaacctctgagggatggaagggttttcatttatttattccttctgtttcttcattcttacctttcaaattcagatcttactgtgggcaggttgcttaacgcatcccaacttcagtttcctcaacggtaacatgcaaattgtaatatttcctaactcagaacagctgttgaggttaaataaatgaatgcatatgcattgctttgtataaagcctgacatacaggcaaccttcaataaaacatgtttttaaaagttattgtcggccgggcgcggtggctcaagcctgtaatcctagcactttgggaagccgaggcgggcagatcacaagaccaggagatcgagaccatcctggctaacacggtgaaaccccctctctactaaaaatacaaaaaattagccgggcgtggtggcgggcgcctgtagtcccagctgctcgggaggctgaggcaggagaatggcgtgaacctgggaggcggagcttgcagtgagccgagatcgcgccactgcactccagcctgggcgacagagcaagactctgtctcaaaaaaaaaaaaaaagttattgtccctcaaaaataagatggacgtgaattttatcaaggtgattagcaggtgttctatggctcttttattctactagtggaaaaattcagaccttacttccattccctttaatgtgtgttttgattttatactttataatttggagaaaaatcaggtttctcaccttcttttaaaaatccaggtgtttcacggaaaataagtacgtaatttagagcaggatccattctctacagcaagtcagtttacaaataatccaaaagtttatttttacttaaattccatataaaatatatttatgtatatatgtgtatataatttaacattgcacgttctgtcttacaagcatattctaacatggaaaaataattgctagactaagttgtctgagaagtctgatgaaactcagaagtttggatttgcgttaatgccatctggatttgaatcaagtaactccctcctttaccacacctccaacccccacagctaaaacaggtaatttaagaaatactagtatattgcacacttcccagcatcctacacaaaagcttagaacttttgcattatgtggaatctgctgttccagtttccaaaatgatgacaagtaaatgatgacaagatgacactcacaagattaatgagagagcagaggggaaaagggtttgcgaggtgggaatttagtagcgttcactttggaaaggttatgggaaacagggaggaaacttctctgagttggtagctggctgatgtggatggagcaactacaaagtgcaaggtggattttagaatggaaggctagcagatgccctctaaggagccacttaaatttgcccagttatgtccatttttcttgtccaaagagctttgagaatttctcattggcagtcaataattactgtaatctaagtgtaagagcataactcttttgcaagcaaatcaataaaactacttgaaactttttaaaaaatcagtgtaacatgcgtacaacaaaacacacaaatcctgtgtccagctggatccattttcacaaagtgaacattgccatgtcatcagtaccagatcaagaaacagcatcacttgccccagaattcctgagtgctctcttccagtccctacgtccccttctaagggtaacccttatcttgacttctaactttatagtttggttttgcttgtttttaatctaataagctatttttactttgaatgaaaactttaaaaaaaacctcttcagcctaaaacatttttattattgctgaactgatcctcttgaacaacagcaacaaaagtgacttacagtcagtttagatggccattgattgggttcttgtctgtcccaagtctgggaagtatagcaggtatagtaaatgccctgaaggagcaaacagttcaacaaaaccctagtaatttacagaggaaatgtaatgccttcaggctgttattggcatggcaaagctgactagtacagtactgttgctggaatataattttctctcataggttttctctcttatcttgcttaacactaatatttccccacctatggtgaatgaggataatttgcagtggctattagtttcatttgaaagtttagcctatcagtaaatagcttcaagttatatttatctgcaatggtatataaatggaatgggaacattttacttttttatgtgggatttggtaaactgtaaatgtttccttatcagaattgtttcatgttatcatgaacaagaatcgccagcagaaaatggaaggggattgctggtgaattgttgactaacgctatgggtctccacttaaataacaaacccctggtaactgaaatcattggtcttcttgttactggagctaataattaggttcatgcaacctttcagatcatatcataaattccaaatgctcaggcatatttcacagtcttttccatctaatcttttccctttctgttctatgtctgatccccctaagcagagccttgtgcccctatgtgtaagtaggcaaaggaaatatagacatatttctgaggtcatttacatatatgaccataaaaaagccattgatttttgtaactaactaactgaaataggatataaaggaactaactaattggaatagattataaaggatgcttatgttctttaagagtctctctggttttcctctgatctctttaagagctaatgttcgattttattatcattaccatgtgttaattctcaaaatttttatttcaatttgtattccaaaaatggtttgcatgtacctattaattgaggttgactaaatctatgcatttatcaagaaactaaattattataaattgagtaacaaactattatataaaattggaaaaaagttatttttatttatactaaaattattttatttatattaaaacagaaataaaagcatcctacatctgtcttttatttcaagggtttttttttttttttttttttttgagacagagtcttgctctgtcacccaggctagagtgcagtggcaccatctcggctcactgccaacctctgcagccgggttcaagctattctcgtgcctcagcctccggagtatctgggattacaggcacatgccaccatgcccagctaatttatttttatttttatttttagtagagacgggggttttgccatgttggccaggctggtctggaactcctgacctcgggtaatctgcccacctcggcctcccaaagtgctaggattacaggtgtgagccaccgcacccggccttcaagggctttttttgtttacaatatttggttaatgttctgtttctttttactgaattgacgtttaatgtacaagatcacagaaagtggattagttagtaaagaaaacatttacctgaagtagtcacatggatatcaatatatagcattgatatctagaagattaagatattattttgccattaaaaaaaacattttttttggaagttgtctatgaaatagttaagagtaagggaaatttaatttaattttaatccattttatagaagaagccatacaagctcatgaagctggaaaaccatagagcgaatcagcaattgatctggtcaaaaaatgttaaagatgccaatcatgatcctccccaggtgtgctgtgttggatatggttgaatctcacatagcatcgattcctacatcctcttagtaggacttcttataatacaaaatctggacttctaaagctacatttaccagactcctttttgacgaacattcttcttgaaaattaatatttccaccaaataaattcatgcatatgagatatggagggcagaaacattaaaggggccaatttcctgcatcctttgggttgtttctacagatacgtgagaagctaaaagaggtgggactttctgtaatagttcttcagtgtctctgagaggcagtggtgacagtggccactccctgttggcagcttacacttctttggcttcaacaaagctggtgttttgtttggaccccgggagttccttcttgatttctcacctttctgaatgtggtagatacaatagctctccccaagggtctgtgctgctatgttctgagatcattcatggagagccaacctaaagcctgctcctccaacccttccagtttttctgtcaagtgcttactttatattaagtccctttatcttcaaaattcaagagaaatttctgtttctcgcaccaaatcctggctgatatggccttttgcggttctaggatttcacagctttcagtcctaaatataataatcatctaagtatcctacatagttttctccttcagtactactgttgagtaaaatgaagttttgctgtaatatttcctctggaattcaaaatccagactaagtcctaatagcaggcattcatgcttatatagcagccctgcttacccctgttcagtcattaagaccacctcgggtggtaggaaaaagagcaagcgtttgtcttttgcatttcacgtagaagcaaatcgaggctagtgattgtgatttgtcgaagggcacataactaagtagatctggaataggaatttaaaactacgtcttctggccaaattcagtgtcctttccagtctaccatgatgtccccgaacagggtccttttagtaacaacaacaacaacaaaaaactttttatttttttatttttttttttagacggagttttgctctttttgcccaggctggagtgcaatggcgcaatctcggctcaccgcaacctctgcctccccggttcaagcgattttcctgcctcagcctcctgagtagctgagattacaggcttgtgccaccacgcacagctaattttgtagttttagtagagatagggtttctccatgttggtcaggctggtctcaaactcctgatgtcatgatccacccgcctcagcctcccaaagtgctgggattatagatgtgagccaccgaacgtggccaacaaaaagcttttaatagagtctaaatgaatacaagtttgaagagattgatagacttttccaaagaatctctgttatttttaggattcatacatatgaagcttagatccctgcaaactcagtttttgagctattgtcttcaaaatagctctttttcatggtgtatgtacagtccgtttttgtctacactgtgcaagatgtgtgagcattggaaaacctcattgctgctttgagacaaaaagggcaggccagccgcagtggctcacgcctgtaatcccagcatattgggaagccaaggcaggtggatcacttgaggtcaggagttcaagaccagcctggccaatatgatgaaaccccgtctctactagaatacaaaaattagctgggtgtggtggtgcacacctgtaatcccgaccactcgagaggctgaggcagaagaatcacttaaacccaggaggcaggcagaggtttcagtgagccaagatcgcgccactgcattccagcctgggcgacagagcgatactccgaaaaaaaaaaaaaaaaaaaggagggggcaatgtatgctctatagtctttaaagatattctacatcagtcagtcagcgtggaaacatgcatgtggaaagacaggtattcaggtatggtgttaaaggtctttttttcattgtcgagtaagtgacatttctgcattcagcaagactctttatatctgttactccaccttttcttcttctcgacatacgtgtaaatgttgtcttttgctgattcctatttaggcttgtcccatggcctctcatagaaatcatggaccatggaagaacaagaatatggtagacatgaaggaaatgtagagggtgagttgcctgctctcaagcacgatgcagaatgcaagacagtgtcaactgagaggccagatctatattacttgtgcagggaggtagataggccttgtttatattacaactagagcaggacttctggagggctatagctttataattatcattattatttttttccctaggggagagcataggcctggcactgggaggtgctgatgctcaggggatatttgtggaatgaaggaactgtctggtgtttgtctggctcacagtgggttcacacaggggagtgtgcagccttgaggcagacctggagggcagtcatgctcctatgagaccttcgtgacctttgaggtgttgtgttacattggttggaacaccttgctccttgtccttccattccatctgaaatctcctagggtcctaagggactctgtgaccttcttaaatgggatttctccatgtgtgtttgagaaggaaactatttattggcaatgcagagctcactgctgttacagtgctgatttcatttaaggtccaaatatgtcttaagattgagtgtatactacactgcaattcaatattggttgaaggtgatgatgcttaatgtatttatttctcatattctaaattttaccattagttcctattttctgaaaaatatgctcacccatacacccaaatattgcaatgaaaagcccttaaagaaattcagaagcgttgggagtgacagaacaaaagatgcatggttgtgaaaacatcctatcacgataatgattcacaaagagaaaaaagaatacttgtgctttattgctaaagtgagaaaagtaacaagacatagttctaaatctgatttataatgaacttccacctacactattctttgtgtacagaggcaatggaagtccctggaacaatgcttttaatttcctcctttctccactcctcgtttaatgtacttgggccacctccattattccagctgccctcctgcccctgagaaatacctcaccttctgcatttatattttggagctcgaccttcctggcatctctgaatcctgacttcattattatctgacaccactcccctttcttttaacagtgtctatatgagtttcccctcagttgaagctttcctaagaacatagcaatatgcctttactagtaaaaatcccaacctcaaaaccaacacaatgttccccagtcccttttcctcctttagttaccgtcttcttcttcatctccttccctctactatgcaagtgtaacttatagtcactgtctccctgtccttacctcctacctacttcttctcagccttccaaagtctttttctgccctcaccactactttgaaatttctttatcatggctgtgggcaacatggctcccagcaaccccaactgatgtttttcagaatcttccttgtttttatttgctgcagtaccttccaccccttcatccattcattcaccagtcatactttaaaaatgtactgatgtctcttttaagcattgtgctagtgttgtggattgatgatgattaatgatttcatgcctgcccttattgcggagacagatgctaagcaaatagaggtacaattattttcattataactgctatgaaggaaaaaaagtacaagtgagtataggaagcatggaaggtttccctggaaaattctatttatgacaagtgggatttaggccagcatgagtagaagaatgtgtcaggtggagggaacagcaggtgtgggtattccaaagagccaaggaacacaagattttgaaggagagaagcagaattagcacaggagagtgtggctcagataatgtggttggatggcaagggcctgcatatatactgcgtaggtccttgcaggattttagacgtataaagtcaaccagaaaccattaaaaccatgttttcaaccctggcaccattgacatttggtcccagtagttttttgttgtggagtctggcctgtgtattatacgatatttagcagtatccctcgctctagatactgggtgtcagttgcaaagcctcccagtagtgacaaccaaaattgtctccagacatagccaaaagtcccctggggtgcaaaattgctcccagttgagaaccactgatgaaaatgataaatgatatactatgcttttaaaagtatccggccagttcactgccctccccgccaccccaaaggccaataagtacatgaaaagatgtttaacatcattagtcattggagaaatgcaaattaaaaaacacattgaggtgccactgcatacccaccagagctatatgttactgaaattattggtttttctcatctgatgcccccactaagccaggagcacctcggttgatttgggatctgggctttaatttggttctctcgtggattatctgaaggatcttgcacgacacttgaagaacaattcttccaacatttccctacattgtgttaaaagggatttttctgcttgttctgtaggaagccagtatcttcacattgcttctctccactgttttgcaccctctactctggaccttcttcatctcttctgcttttctttattttgggaaatttcagagtagagacactcctggaggaaaagtctcatcaatgctgatacacgtggatgttttactccaatgatcttaattcctcacctggcatccaagactacgtttataatgttttcatttcatagtcagggctgtattgctcatgtttagtttgacaagcatcacatctgattttctgtgacccttagaactctttgcccgttgcatagctgttttccccccagtgtctctatttgctgtatttggccctgctgcttcctgatgcaagtcttgggcaatccctgtggaacatcgcttgttacttttcctgttgactctgtggtatcgattagtttagacgtgcatgcctctattcatgtgtgttctcttgtaataccataaaaacatgagaatcgctgtggagtgagaattgtggtcaaccttggccaggagactttctgacagtggtgctgaggaatgtgccatgggtctgtggactggcccttgacatgagccttgaggtttagggttatgctttgtagtagtttactaagacttccatagcaaaggaccatagcctgggtggattacacaacggaaatttattttctcacagtttgggaggaagtgggagataaaggtgtcagcagggttgcttcctgctgagggccgtgagggaaggatgtgtgccaggcctctcgtcttggctggtagatggcctgcttctccctgcatcttcacatcattttccttctgtacatgcctgtgtccagatgttctcttcttataaggacaccagtcatactggattagggcccactctaaggcctccttttaacttaatcatatctgtaaagaccctatctctaaataagatcacactttgaggtactggggattaggacttcaacatgtgagttgttggggaggaggccacgataaacctggtgacatacctccgcctggtaaagcgtagctcagagggtagcaacatgacagctctagttagatattgaagaactgacacttagagaagaagttagatttattttgtactatttaaatgttaaaaattaaatggtagctgcatatgtggataaaaccataaactgccttgctggaattgtgtgacaagagcactgagattgctttgtgagaaatctccctgttaaagagtgtccctgtgaaggtttggagttgccctgcctaacagaaatatagcgtgagccacacaggacacttgtaaatgttctagtagcctcattaaaacaagtaaaaaagaaacagatggaattaatacgaatactatatttaatttaatccactgtaggcattttgacatgtaatcaatgtcagaaatcattagtgagctattttctattcctgtttccattcttagtctttgaaatcttgcagcacatcttagtctcagcagtcgcatttcaagtgctcagtagtcacaagggagccacagcagctcctgtactggacagcaccagtatagggcatccattctcaacaggggccatgtcgcttccaaggaaacgaaaagtggttttggggaacaaaagaaatcttcttactgtttttgttttttttgttttttttttttttggtataaggcacagttatacatacagcatataaacagatattcagcctatctgcaatattgaagtgtcatgggggatgattagaaaaataaaaacctaaaaagcctcccttgcagggcaataatggaaaaagttgagaagcactgttatagagtgcgtacttgaaggtttaatttccagtgcttcccataccagcttaactggctttccttgaggaagtcacttagcccaagccttggtctaggtatctgtaaaatgggaataataatagtgtctacctcttaagttattgtaagtattaaaggagaaaagccacgtgaagttcaccacagtgattggctcagagcaaatgttgagaatgtatcagttactattcagtcagggatttttataaaaaggtatactggtattagaagtgagtttggattagtggtgcctttgtcatttcgtctcagtttctttagtatttattattgacttatatcagtgcattgatgagcaaatcattgtaatgttaatgttgattccagtgactcttttttttcttgctgaattgtttctcattcttcaggatttcgaggttttgttaaggtcttttgctttgccccttgattgtttttgatttggcttaaagactctttagagattcatgtaaattactaaataacatcttcttaattactatattaatcttcactatttatgatataggaatgacagtaaaacgtattatatcaaataaagagcagcaagtagaaatttactgaacattatctgctattactaacttaagacaagtatgtttattggttttcttttttacagacaaacatttatcagaaaaaatacaactttaagtaaattagagttgaattcttagaagcaatatactcacaagatatggtttgcctgcattctaaggtcacaggtgttcttggaggtaaacatcatcctattcctgacccaaagcctcacctattgtaggcctacatccgtggttttgtaagtgtggcccctggaccaacagcatcagcatcaccatgagcttcttagaagtccagattttcagactccgtcccagagctactaaatgagggactctggagaaagagcccagcaatctgtgtttttacaagatctctcagtgaacttgatgcataggcaagtttaaaaaccacaatcttatgaaatacacacatgttatagatgttgatggagaggtaaaggattaaaatatagaccatctgagagctgtcttcatcattctacagtcaaaggtcccaagagtcgcaacccatctgcagctcctttgtcaatgaaggatggtcatatatttcaagtttcaaacctgggtatatgttctgacaattaagaatatttgggatctgggttgagtggctactttggtatggggagaatatagatactagcagctatgtgggaggtgggaaaacaagcaggtggaattgaaaatagacattcatatatttctgggtcagatcctactttgcatggcaagaatgccaagttccagctgatcttggaatgttagaggtgattatgaaggaagcgggcagggagccgagataaatgatcacttaacagaggaactgtggccggaagagtggggtcaagaaaacattgaacaaagaagggttaattttgaaggaggggaaggaataagctagaaatggaagtatctgaaacaaactaggcagcatagaacagtgttcctaaatataaattttgaaaagttttttttttttttttttgagacggcgtctcgctctgtcacccaggctggagtgcagtggtgcgatctcagctcactgcaagctctgcctcccgggttcatgccattctcctgcctcagcctcctttagaagttttattctgctcacttaaatatttgattgtatgggatccttgcagggaatcgccaccaagattttgattagaattttgtcagatgctctgataagaaaagaaactgacctgaaaaagataagttacacctacagtttattctaaagtcctctagaagtgggaatgtgtgctgtgtgcagcctgtcaaaacttttattttggcaacttctagaagtaacaaaacaggactgaaaatattgctatgatttattggaaacattggtgtgagctgttatgcatgcaatctcatgaaagaagcctaaactattttaaaaattagtctttcattataatatcgtttatttccaaatgtctttttttgacatttagaagtaattgggaaattttaaaattctagctgaagttccttgcaacagcacggtccttgtaaaagatatttttcaaactgcatgttaaggatgtatatatggaatatcagcataaaacagaatggcagttcctcaaaaaatgaaacatagtactatcatatgatccagtaattccacttctgggtatatactgaaaccaaggactcagatagatatttgtgcccctatgttcataacagcattattcacaatagccaaaaggtggaaacaacctagatattcatcagtggatgaatggataaacaagacatggcatatacataaatggaacattattcagctttaaacaggaaggagatatgacacatgctccatgaatgaagttttaggactttatgccaaataaaataagccaaacacaaaaggacaaatattatacaattttacttatataactacttagaatactccaattatttaattacctggagtagtcaaattcatggatacagagagtaagactggtggttgccaggttataggggcaagagggaatgaggagttagtgtttaatgcatgtggcatttcaatttgggaagatttaaagttctaaagatggatggtgctgatggcagcacagcaaggtgaatgcatgtaataccactgaaaggcatattagaaaagagtaaatgttatgttctgtatattttactgcagtaacacagaatatcctgataaacttacatttagtattttgatacatctgtttttaattataatccactataataataatgaacatttttatgtggcaaacatgcccagatgctttaccccaaattatcctagctatttctcacagcaaccttctgagttaggtattatgattattcccttcttttttcagttgtgtaaagctatgcactgagatgggacaggcaggaatttgaacccagagaacattttccagaaccaggctcttacaataaaacttaatatgtagattaaaatcattcatactgctctgcccattaggaagaaaaaagtcccaaatgccaaaattatctctgcaagttctaattttcattacaagttcttttaataagctagatgatatgacacactatggttatgtgtatgaaaaaattgaaaaaactggcaatttatgtctctctaaaaaatgcaattcctgcaaaggcctgagtgtttcagtataaaaatccatatccagtggcatgtattttcttgtgcagatggtatgtctttctgaaaattgctaagagaaaagaacacatattttagaaatgtttaatattataattacaatgtatccaagttttgctttatactatgcatgctttaaactcagaagactatttacctatgatgttttattttagcatgtaaaattgaaatttgcaacaagtttgtatatatctttctgaatatgtagaagatggccttatttactgttaccttggaaacagtgatgctcaaatactatgttttactctattacaattaaaaatcattttatggaacaaatgtaatttaaaatactattcttaagcatggattttagttaatattaatcataaaaataagtaatgatgtttagtgttaaaattatttgaaaagctaaatatagatttttaatagaaaacataccttaatcaataaatcataatgctttttcctttacaagttatgtataagtcttctgattattaggaaagaacctcagttacataatggataattccatgaagttaaaaatgccatgtctaatttcttttgaaatttttcttaataattgactactttggagaatctgtacaattattacttcttaaataactcctggatagatttttctacagtgatatatgttgatattcatgtttcttcttacatttctaggactcaactattgttactccaattattttgaggactgaccctcagggatttttcttttactggacagatcaaaacaaggtaagaaatgaggtatgcctttcttacatttttcagtcgtttactactttgaaaagtatttatgtatcttatctatagaagaacatccatttcacagatcttttgcagtttatttaaaggttctacttttaaagaatatctaaggtattcttaggacttaggacgtttcaaagtcactagtttgaaatattagatttgctaaattctagagcaattggtatttttggttctgtttatattatgtgttaggataagaacagggaaatttgaattacatttggtgtagcacataattagtcagcgttactgatttaagtccccacccataaaggatgaagaaaaatgatgagaaaataacttttgacccaatagccttaccccttggcttttctttctctctcttttcccctgtgctgttcattaaggactctctcagaatcagcaggaatttggccctgataatttgttgatgtcagaaaaccaagaataaaattcctttagcctattccttcagttgtcaggaatttcttactaaattagctttctgcccacaatagcatgaatttattatctcatttgttatgaagccaattgatgattctgtactgaattattaaaaagtagaatatctgctgatcataagatttatttggagtttaatgggcagttagatgagaacactcatggaaagtggttattatttcaagcatcgttgccacagtcctacacttgaacctcagaggccacagaatatagaatgtttttgttctctaagttttgatatatggagaaatgggatagggtttactgagaatgctaaatacatactgaaaacaatagaatagtaatagtataccattaaaacagctggaacctccacagttacggatgaaggaggaacaaattgttagctctttcaaaactctacattagtttcttatatccaaagttcctggagttgcctgtcagctttgccttctgtctctgaggcaagctcaattatacctgtgtctggtcccagggccactcctgaatgagcctgtttacacatcattcaaaaggtgaatttcagtcttgttgtcctggaattagactctaaatcagtgtgccctggaaccatgtgtggctgtagaagtggaggtaaaccacagaccctacgctaatgtcaaaaattgtatgagtaagatttcctacttaacgctcacatttattattgggtgtgttaatcgctttggcttagacattctgtttggtttcctgctgttatgtgtaaaacaatggcttgcaagaggttttgttttttgggtgtttttttcttctcctaaaggatatttttagaactgttgaaactatattcatgaacgatgtacttataatgcctagagcatttctaaacgttgggtatttgtacgagagaccaaactgtcagtttgatttttcaacttgtagatcaagcttctataaaagcaacagaagatattctgggatttttaaataattcatggcaactcagttaagctcccctctagaccaatcatcaatatttatttccttaataaagaaaaagggtttaggaccaaaggctctttgttgcatttctgttgtgaacccagtattttgacccatgcttattttcaaaggtaggaaaatttgttttcattttttacacaaacttttaaatcttggttgcaatgctgtttatgaccaagcgaaacagataatgtggtagcaattccttttatcatgttattgcttttcttttcatggatattactcttacagttctagccaagagatagaaatagtaaattttacttttcactttctaaatgccaaagtcatctctcagtcatttatcagaatttggaggctcatttcttagtgatcatatatcttagaatccaaaagatgagaggatttaagaaaaaaaaattaaacttaccatgctttcaagtttgtcattttctttctggcttgaagcccagccctggaaccagtaagagtgattcatccacttttaggagatggacgactccaagtgatgaattagagtaaatgtgtgctagaagaaatggtgcatgcaaataaaagatggcatgccaagcttttagtggggatttttttgcataagatcatttgaaggtacatgaatgaatggtacattcatgatgctacttagagggccactttttaaaaaatattttttatctggcaattagttttaggaatctgccacatgtaccatagagataatctctcagaaaacaaaaaaaaaatgtgatacctttaagtttatcccttgattttatacactgtgttttccattggttgggaagcttgcattggtatttattgtaatatgcctctcttcttcctttgggcttcttccaatatattccctctttggtccacgaagcttataccaaagcacttggattagcaatcatctgaggcctagtctgctcagaggtgagcagaaatccctagcagaggggattttacaagtgttttttatttttcttttttatagcattggaggtaaatggccacattttatgatgttctatgcatgtccgtctcttgtcatggctacatcagatcttgtatcagagccacttatttcaagccactggctttcccctctgtagacaatgacatgctaccttccaaaacccctcctttgatttgtcaccacagaaatgataggtgacaaagaagacagcacagatgatgaatttaggaattaaaaactaaagctagcgagtcatttttaggtagcagaaatgtgctttagtgaaacactgacaggatgtttggagttggtggaagcagataaatatgaatatcatttttagggataaatgttcatgctttgtaccagctctggacttattttaataattcttttcactgtattgttggctctgtaaatcttattgaataaaatgagcaaaaatgagtttctgaatatgactattttaagcagagtggtttttcttgtgtaagtgtaggtgatgtgaagaggatgaatttatctgtaagtcatgggtgagaagggagtcctgcacagcctgagtacttgagaggtggcctacattaggctataacttttctttggatccgtgccatgtgaacactagaaaccaacacaggaagtgttagctgtgaaaaccatgtgaactataagaatctgctccaccggttttgaaagaaaggctaaagaagaaaaaagtgtcaatgttaaagagctaaccaaaacctatcctgctagaatatgaaaaaaattagacctttgccttgcaacctgatgccctgcttctgtgccaaggttggtgtaaaaataaaactagtcaccactagttcagatccaagaagttcaatatagttcagtaaacccttccttgtcttcataaaactggagcttgggggaagggaaaaggaacacatcattaaatttgaaaaggaatgggaggaagaacacacggtttgcatgaagaactcccattactttcttttttgttacaaattttatttgtttttaatattgtggataatatacaaatatctttttatctgtaaaatagtaaagcaatgtaactatctttaaactgcactctcccattgactccaatcctagttctctattcagagtcaactaatagtaatagcttcatggtttcttcctaggtctcttttaaataaatttgtgcatgtgtaactatggaaatatttcattttgttttgcttatgtccatttttatactaagtcacatcatattaaccattctacaatttcctttttaccatatagtgtgtctcagagaacttttcaagttagtacatgtgtgtctatatcattccgttaaattggcctatcttagggaatttttcatgttagtacatgtgtatgtatcacattctttcatattgctctatcgtatgttaaacaattgattaccacattttatttaagaatacagaagttctcactggtggattcttggtgtttgtctctaatttggggttacaaagaatcctataatatggagtaatagtcagctgtgtgtagccctctctgggaatatgggtcagggattccctaaggtaaatgctcagaagtgcgattgctgatttaaggctatacctatcctaaattataatgaatggctgtaccattttataaccctacctgtcttatatgagtggaactgttttcttaagcccaaccaacagtaataggaaatattttaatttttgcctaactgatgcaactgttatatcaccttgttttaatctgtcgttgcctgatttgctagtaaactgtgtatattatcatacatttattgatcatttcagtttttccttacatggattgcctatttatatctcttgcccttgtgtggacagttctctgtgtattctagatgtactcctttagctgttataaatgttgcaattacactcttcctgtctgtggtttgtctttgactttcttaacatctaatttatgggtaacaaaagatgacttgaagctttaagttttcatgtagttacattccaactacctccccactttttgcttcctttaagatatttctgattccttctcatcaccgttattaatctaggtttttaatccatatgtaatgtattatgaggactggtgtaaggtggagctctaacttcaatttcttcatatcactcgtagagctgacatttcactacctggtttggatggcccaaagatctgttatgttttaatgcctgtggactgctgggttctgatttcctacttcattcttatctcatttattttctgcctttcttactttgtggttcaaaattgtaattctttttgtttacccgtgatcctatattagagatttaaatttatacctgcatatttagtcatttctggagacttagggcaagaaagattggttctaccattcatgccatctgccatcttgttctgccctgtgaatttgcatgagacaccattctggatgtttgtacagagtgatgattcagtttccattaatggcaaccatagatagtcttctcttatgataaccttaaatttctacagagttcaaaagcaaagtttaaaagttaaatatttacataagtcacagtaacatttttcagcatgagtccagagttcaaaaatattttgaatgatgcatcataaatgtcaacaagaaaatctagtgatttcctattaaaaatagtctggcttccataaagaactactgggtaccacacatttcattaatgatttttagcagtggggctttctctttgggatatgcttctctagggtatcccaaaattgtcaactttgacccttcttgtgtatagtaaatgggataggtcattcaagagtccactgagtgattaaatgcaatgatgtagttataaatttagaagataagtgctatttattttatttggtagctttctctaaaagttgaaacaataacttacattatctgggaaaaaaaccagcaaaattcacgtgaggattgctttgtgagggctgggattgttccttggcctggagcagtgtgtcagtcattgttgactaagcagcagcatctggggactaagtcctttccttcaccttccttgaatttccttcaccagtattgatgatattaatagctaaaacagacacagtgccatacccacaccctcttcctcaccactcctgagaacataagccgggctccagtggctggccagtgcctgcattcttttgctttgtctggctactagaactcatgttgctacccatgcagctgcccagaagttcctggcaattcacactcaccctcaccaatgggattcagtggataaataccacagctccctcacctcttgggtgggataacttaaaggtgcattctttatattatatcccagaactctctagtgggattaagcccagttacccacagtggcaactggcttgaaaatgttccccttatgggcttccttcccttcctgtctcacttctccactcctgattgtgttctaaaaccacctctaaaataaactacttttactagaatccttatctaggaactgcttaatgcagatgcatagtgcttaacaacttaatatagatgcccccaaatgaagggttttaaaatgattccttggttaagagagattggaacatattaagtgaacacttttatttgaagccaagtctgattttcctaaaacagtcctaatttgggaagcccaaagctggttgaggaaaccagctttgaagctgtgacagatgtggtttgtcacagtctggctctgctgtgtatttaatgagtcaccctcagtgaatctctttaaaaatcaaagccttggtttcattatctataaggtgggtattactctcttagtgttgttgtgaacattcaatgtgtaaaatgaatgacttagcataacacctgctactttgtaaactctccatcctttgtggtggcttttattattgctacataataaacaatgactctctgaccaaacaattgtccataagtattagagaccacaaaaatgtgctgttttgaaaaccaagtgaccatttatttatgtatatctttttattccttttttcttcttcaaggcaacactgacttgttttctatttagactctgctgtggtcttttgatctgaaacattgaagcttaggtctgtttgggcaaataagatgtttatttatgtatttcataatgttgtgggaacagagccatggaaggcaaaagaaggatttattgtttaaaagactttccctctggggataatttgctaataaatagtccatcataggtgaaagtttcttggacccttggaaatttgaagcatcgtatggaacaacttttaagatgatttagaggactttgataggagaaaattgtattattcacaagaaaaattggacacaatcatggttgcctatgcctttttcctaagatagtcactttaggattgtgacaactacatgggcatcaggccactcctcttcctccctactgaccaagaccttagagattaaacttttagtgtttttgaggatagtttagccactaagccaaggttcagattgctgaggaacaaatctatcctcaccatatcaacttccaggttaagtttttccatttttattaacattaccttcttttcacttctgtgactcctcagagattttgcaccagtgaactctggctagcatagaatagacatgtcatgatgccttagcttatgtagacacaacatacaaataaatgttattagaatggaatcatttacaagttcttcttagaggatgtgatgtatgatttttttggtagaatttctaattgaagtgtagccttttaaagtatattttaaaattaggctagtcattttgagatggtttcattgcagcttctttggaatcatttttagagtagaaatgcattagtataatttttatgtcacaatcaccacacttcattatgggcataacaacagcaatgcttgttttaatatattgtaaccagagtttagaaacatgtaataccacgaaaattcattactcctaatataatttaattacaaaattgttccttggtttcataagttgcatatatttagctcttcccactactttaggagaaattaaattggatactttccatgctatgaagctattataatggaatatttgtactttttgatgccaaaaaatggttcgagccattggattggcagaatatgtgaaggaaatgcattctgcatattgttcataattttacttcctgttacggagaaaattcctttgactttgttacaaatagaatccccgggtacttggtattgatataatgccatgctcttttgtttgaattacaaatgttgtaggtagagtaggcatttttggttgttctgtagttcattttcttgccaactcaagattgttgatggtactgatggagacattattgtattagtccattttcatgctgctgataagacatacctgagactgggcagtttacaaaagaaagaggtctcacccacaacatacgggaaatcaagctgagatttgggtagggacacagccaaaccatatcattctgcccctggagcttcccaaatctcatgtcctaatatttcaaaacaaatcatgcctttccaacagtcccccaaagtcttaactcatttcagcattaactcaaaagtccacagtcccaagtctaatccgagataaagcaattcccttctgcctatgagcctgtaaaatcgaaagctagttactttctagatacaatggaggtataggcattgggtaaatagagccattccaaatgggagaaattggccaaaacaaaggggctacaggcctcatgcaagtccaaaatctagcagggtagtcaaatcttaaagctccaaaatgatctcctttgactccgtgtctcacatccaggtcacactgatgcaagagatgggctcccatggccttgggcaactccgcccctgtggctttgcagggtacagcccccttcctggctgctttcatgggctggcattgagtgtctgtggcttttccaggggcatggtgcaagttgtaggtggatctaccattctagagtctggaggatggtggccttcttctcacagctccactaggcagtgccccagttgggactgggggctccaaccccacatttcccttctgcactgccctagccgagactctccatgagagcaccaccccagcagcaagcttctgcctggacatccaggtgtttccatacatcctctgaaatctaggcagaggttcccaaacctcaattcttgacttctgtgcacccacagactcaacaccatgtggaagctgtcaaggcttggtgcttgcactttctgaagccatggcccatgttctatattggcccctttcagacacagctagagtggcagggatgtagggcaccaagtccctaggctacacacagcacagggacccttgttccaacccacaaaaccattttttcctcctaggcctctgggcctatgatgggaggggctgccatgaagacatctgacatgccctggagccattttccccattgtcttgaggattaacatttggcttcttgttacttatgcaaatttctgcagccggcttgaacttctcctcagaaaatgggatttccttttctattgcattgtcaggctgcaaattttctgaacttttatgccctgtttcccttataaaactgaatatctttaacggtacccaagccacctcttgaatgctttgctggttagaaatttcttccaccaggccgggcgtggtggctcatgcctgcaatcccagcactttgggaggctgagttgggtggatcacctgaggttgggagttcggaaccagcctgaccaacatggagaaaccccatctctactaaaaacacaaaattagccaggcagggtggcacatgcctgtaatcccagctacctgggaaggctgaggcaggtgaatcacttgaacctgggaagtggaggttgcagtgagccaagatcgtgccattgtactccagcctgggcaacaagagtgaaactccatctcaaaaaaaaaaaaaaaaaaaagaaaaaaagaaatttcttccaccagataccctaaatcatctctctctagttcaaagttctctaaatctccagggcaggggaaaaatgctgccagtctctttgctaaaacataacaagagtgtcctttgctccagttcccaatgagttcctcatctccatctgagaccacctcagcctggaccttattgttcatatcattatcagcatttttgtcaaagccattcaacaagtctctaggaagttccaaacttttccacattttcctgtctccttctgagccttccaaactgttctaacctctgctttttacccagttccaaagttgcttccccatttttgggtatcttttcagcaacaccacactactggtacaatttactgtattaggccgttttcatgccactgataaagacatacccaagactggacaatttataaaagaaagaggtataataggattacagttccacgtggctggggaggcctcacaatcatagtggaaggtgagaggcacgtctcacatggtgtcagccaagagaaaagggcttctacgggaaactcccatttttaaaaccattagatcttgtgagacttattcactatcatgagaacagcagaggaaagacctgcccccatgattccattacctcccaccaggtccctcctacaacacgggggaattcaagatgagatttgggtggggacacagccaaacctatcacttgtcaagctctttctatatttaatcagcaagacaagtctctttttgtcttttgggaaaataaatttagattgatagttggattatttaaacatttatcacacacacacaaaatattaaaataaataatataattactttcttccactttaaaatattttaaatttactttaagtaatttaaaaggcaaaaatgcaaactttgaacaactgacttattaggacgttggtacctattataaataagtttctcaaatctagcaaagtatgtaatattcactaatttactttgcacatacctttttatcgttgttatcattatccttgttatccttagcatcaccaacagcaaacacatatatgctgttttatccttgccagacacaattctaataatatatagtctgtatatttatagcatatacatatttttatacatatatttatatagtatatgtagcataggtatacttatagtctataatagtatgtatatagtgcatatatgctacatatatacatacatagtgtgtctatatgccgtgctacatatatacatacatagtgtgtgtatacttacacatatatatagtgtgtgttaacagacctatgcaatttcgtcatttccataatcctatgaatgacagtgctactattatctacatttaaaagtgagtaaactgaagtgtgaacagaggttatgtcatgatccctggttgtacagttggttaatggcagagtcaggaatagaaacaacagtggcagtgcagtctggctctatgttctggctcttaactttttgctgtttaaagaacctgtttaatatgtaaagttaagtttgcctgcaggatttttttccttggatttgtttgaaaaagaaacctcagtaggcctagtacatttgctaggaacagacaaactgtatgaagaaggtattctcaagttgggctgcacaatgaaatcacagggggagcctcaaaggacgctgctgcctgggcttcctgtctccagagaatctgacttaattggtctggggtgtggtcagaacattggactttttttttttttttgaaagctcctcatttgattctaatgtacagccaaggtgaacacagatagaaagcaagctgaccttacaaattaattcagtaaacttcctgaaaggatgtgctcactttgcctttcctgcctgtgacgtggcctactttctactcagaagtaacactccacatgagcaactacaggccctaccagattctgaattatttgactatgactggataatattccttacactgtgcttagtaaggcaataaattactaggatttttttagaattagtctcaatatctaaggttgaatcaaaatagtttttttattatattctgtcgatgaaaatttttttaactttccattccctgaatgttacaggtattagctgtttgttttatcgttaccaaacatgtcctcagaattcaagtcctgtttattaaccttatatttgtgttttttgagacccttgtttagatcacagtactgtgtaaattccatacttaattaaattagctgcacccttgaatgagtgaatgtggttttaagaatgaccttatataactattttattttatagctaatttttcatttctgggatacaaaggcagatgttatcttattaaattgtagcattatgtcatttcttatcaatttgtaggaatccttccttaactgagacatacactcaactgggcaaaccagagagagctagataatttcaggtgtgataggaagtttgcctttcatcacctctacatgatacatttcagaatagtaaaattcacatttctcctgttagaatgtttggttttttattctgcttctatagggaatggggattgtggtaatgatttttcatgagatttctccctggcattgtgcaaaactccacttaggaacagtggtctgaaaattatattgcatcacggcaaacaatgcacctgtgtgaaatgaatgcttaagtgaaaagttttatgggacagagctagttgctatgctaagaaactaatgactgtgctggtatacataatggattctatttttagatgaacacttggtcctatagcatggcttcattatgcaagaggacagaagtttcagcgttatattgtgaatattgagacattaacatatcagagtatatgccttcttagatactaaagtgactttttcatatattttaaccctgacatagttcataactagaggaaaaaagtaaagaacaaaaacagaatttcaaaataatttcaggtttctggtgtttgtaggttgagtttttccaacagttgactgcaaggaaaggattcaagttcaagtggtttatttgggaggtgaccccagaaagtgtgggcagggccatggggaagtgagataggcaagggaagacagccattaaagggtgcactatcaaataagttaccatggtgtacaagtgaagctccgtcccattggagagccctgggagacagtgcagagaggagagggagcagtggtatacccaccagttcctaataatcagtgactgggggcagctctctcaggggttattttctcagctcttctgccagcctctcctggagactgaggggcttccaggccagtgggccctaggctttgagaaatccctcagacatagatgcagctggaagctgtccgttggcatacatgaaaacacatgggcaccaccagcagcaaccactctggtggctttaatttctggtaagtcagacttttaaaatctatatcgcagtgtgcaaactggagcctgcacccattcacgaacagttcttgcttggcctgtgcaaataattaaatacataaacatgagttgccagcatttaaaaatctgcaggttcatatacagatctggatttctcaaaaaatcagaaggcatggaaatgccggccgacatacccccatggccacatttggctggggcagtgcagcagctgcctgctttagacagggtgtgtggtatgcaatctgccacatttcccaccaggctagcctacctaatttacatgaacttttaagctcatttagatgtttgagtataaatatcgggcctctatggtaacatcctatactggaagcttcaataagctaatgattgcaaagcttcatatggaatgaggttaattctgtcacagtgggcctattggagtgctgtggcataaagactagatttttacagtggaaaaatggctgaagatcagcatatccaggtcttgctcgtaatggccataagcaaagcaattatgctccaatcccaattcttctctgtgatgtatggatctaaagtgtaggagccctgaggtccctctctgacttaaaaggctattattccaaagtgactttcaggtgtcattttgctaggtaagatttataaatatgagtccttggcaaaggattttcgtgtcgaattgggccattaatctagggaaaataagaatggtggactccaggacaccaggcagaatgacttcccttggttcccttggttgaatgaatgggattaacttcacccccagatcaaggcagtgagcattgactggtttagccaaccaatgtagtccacccttttctcaccgtagagctgtgctgtctcatacagtagcctctagactcatgtcactgtttacagttaagttttaattaattaaaattaaattaaaaattcagtttctcaatcccactacctacctttcaggtgctcactagccacctgtgtccaggtgccatttccatcattgcagaatatgttattggacatcactgcacagagcttggatcaggaatggctcttcagagccaatgcaaagtttcttgcaataagaagcttccttgaacttgtggggaaagaaactttccttctttttctggattatgtgctgcaaggatgtaatatctggactcacttttgttatcttgttcccatgaaagaagatattggagtagctcagatgccactttgggagctcaaaggggaagctagccctgcagaagacaagccagtgaagaaccaagtccttaatgatgtcatttgagataccagatcagtccatttcagttccatgaatgaatcaatccccttcataggctatgccagtttaagatagagtgtttgtccctttgcagttagaattactgactgacacattggacaatcatttatttgaaggaaggcagagactcaggtgttaaggatccagctaacatctggcccataaacttgaaagagaaataaaagcgggaatagaatgtgttaactctgtcagtggctatcattccctgtacaagacattattgttagttttgtatagttttctaatctgggctttaacatttcaaggataattttagtggcttctagccatcatgaggaaagaacatgtcttgagaaacatggggaaaattgaaaactgtacagagaatataagtttttggcaatgttgtatgttaacctaatagccttaatggtaccatgataatttctgggtaaggaaagtagaacttattaataaactgttgtgctgcagacattgtgccaaggtaccttatgtggacaaactatcacatgaattcatgaattgattgatttttttccattttgcattgaggaaactgaggctatggagagggtgatttttaccctggaagactctctctaaccctgccaatttagaatgaaaccctctcttctgttcttctggaataccttgtgccttcctttaccttagcactattaatgctatgttgattctgtctgactctttttcctttcccagtggatgatgaaggccttgaattcggggactttacctcatttgtttggcattttgaatacactgctaacatacagtcactgctcaatcgatgtgtgtcaaatgaatgagacttacaaaggctgtgcatcttgtctaaggttacaggttactaaatggtggaaagccagatctgtcaggtccaaagccaatgacctttcagtagttcattcattaaaaccctctccttcttgtttaaatctccagctgtcttactcttagcagtttatgtgacctctgcctcctggagaagagagaaaacacagtattccctgccaccagacctaatagcacactttcatttacagctgctttcctctgtctccctcttcctttcccagcccatcctttccactttgaccctggaccctagcttctcaatgatttcatactaaaattgatcccttccctttcttatgttgtcaatatttcccctgtaaccagatctgtacatcaatattaaacatgacatgcttacccatcttaaaagaaaaccctatatcccctcttgaccctcactggctacttcctttctttctcgctttcactcatagcaagcttcttcaaagacctgcctatgctctccccattattctcacctttcaccaacttttcaatacatatcaacctggattctgtacccactactcctccaaattagtctttcttaacccatcaatgaccttcacattttaaaacatgctggccatcttgagctctgtggtgcttgattatttttatataattttacattgttgataaccccattttcctcgaaacactttcttttcttgactttctttttctcctacctcttcctacctctccagccacatgttcgcaatctactttactggctgtaagttgcagtccttctctactcacatgttagggaatctcacctgcacttaaaacttattttaccatctggatacattggctcccaatttcatatcaccttccaataccctgttcctgagataccggaaagcaaacatttccaagattggtatcatgttcttcctcccttaaatcctgacctggtcctggtgccttattaaaggtaccacccttcacagagtggcacagtcctgaaccctgaaagtcttccttaacaccttcttttccaccttccctccaagttcttggcccctttccttttgtgctccgtccacaatagccgccttctgtttccctagacacggcatatttctttctgctgaaatttttcacaatacttttcctctgcttggaacacatgttttctccccatggattagcccctcccctgcttcaccacacttctcacagttgtaatcaaatgttttttacatagttatgtaatatctagctcccgtattaggtttttgactcaatgagagcagagtccagaggtgtccttgtccgtgtttaagacctggctctcttaatggggaaagtaacttgtagcattcgccaatttccatggtgtaaatactgtagtgtctgatttcgagatatggatacttcatcactgaacacagatttggaaagtgaagggtacagttggctctcataagcttacaagctttccccagctcacccccagggcagatgcttgtctgtcttattgactgctgtattttcatgagttagggcagtgcttggcacattgtaggaactccaagactattagttggaggagtgactgcagtgtttttattaccattggaaatatagtaaaaagtgctgatgtttcagagaaaaatgaaataattttttaaattttagaattggacccagcctgaaagtttatcatatgccatccctttgtttttcttcattagaattgagggtcaggaagtgagatctgccacaatcacatagctacctggtaaatgagcccaggttaaaatgcacatcttttaattaccgaccaacactccttctactgtagtgcattatcacttctaaaaggaaagtaatttctttccactagtgatttagttcagattgcattattagatagtgacgtagttgaatgtataattaaatctgctttacaaaagaaaaagcagtattttatcatttctttttaaattatgagttgtctcttaagagggatttctcttttatctttttcttctttaatattctgatgtacttatttatagaacaaagacattagtcagcttttgtggtgtagcaaaccaccccaaaacttatgccttaaaacaacaaccatttttttgaggtcacccttctttgggttaacaatctggtgcaggctctgggggatcatttttctggtctcaggtgggctccttctggcttctgcagctactcatgggttggatgtgtggctctgctgatatggctggcctctcctgtctgaggcttcagctaggatggctaggctgacttgtatctgtcccatgtggtctctcatcttccaacaggctagtccagcttgctctggtagttcactggcagagttctgaaacagggtggaagctgcaaagccctagaagcagaattgccatactggcacttctgccacattttctatgccaaagcaaatcattcataggttggggaaatagatgccacctattgatgacaagatctgaaaagtcacactgcaaagaggcatggttacagtgagaagaataatttgtgactgtttttgaattacatacaaaaaagtaatttcttcttcaaattagtagaagattgtctctctgatgggatagaactgactgatagcttcctcatccttctgaaatattaaggcaatatgaagtaccccacctggacaattgtgttaattatatatgcccaatattagagcacttacgctgcagtgaggtgggtgtctctcaccataccctagacttggaggtccctgataggtgttctgaaagaagatccctgtaaggttatagggaagtaaagccgcatcccaacatggtgcacagacagcagcctcctagcaacatctcttaaagcagatggtgttttcagacatattgaggaatgaggtgggttgggagcagttgcaacaagatagggaaaccttaagtcatctttgaggatactagtttgttgtgctattttttttcttcctaaatgatttggaagtgatttttctgtgcctgatgtagtcttttttttttttccctttctttgtatcctgtgttgggaaatggaaataattcaaaatctgtaaaaacactgggaaaatggaaattaaactttgggattctttactgcagaaaaatgatgatgggaaatgttcttcagtagagaggtagaaatcatttcagaccgcttctcctagccggggcccacaacatgcatttttctgggatgaaaacacatgagtttgaccaaggaaaagtttggtagattttgtcaatgaagcatgaaaagggatcagtctttactctgagctcatcttttttttttagctgagtgtgctcttggaagatgcaggcatcagtgtatttatatctgggtcaacagggcatgcggtgaaggggaaggaaggccattacctagtgaatgtatattgggtggggagccactgaggttaaaaaattcagcctactgccatctctttactttgggctgtatggaagttgttcatgacctccataattgttcttttgtaggataccctgtatcagattatagactctgaaatccaactcccagggttcaaaacctgccttgaacactatgtatctctgaggaagacatttaactcattctgagcttccattttctcttctacaaactagaaataataaataggaatcccatgaggattaaatgagataacacatctgaaacacttggcacaacacacatgctgataggtgcttcacaactgctactgatttttaggataaattttagtaaattttaatatatattgtgtgaatctgaactaggacaggtattcggatacttctgattcatattctgagtctttttgcacccaattggttgaaacatcagggcccccaaggaatgccagtgtctcaggttgcagataatactgccaagttgcagataaatccctgattggacaactatctaagagttagtagatccactcagactcccaggaacttggagtgcagttttcgatgcctgaattcagagaggacagggtgcgtggtgcatgtggcctagtctacaattgcttctggcctattgaatcttaggaatggaaggctgaaggggagaagatagtttgtcatcaaaactaaggttctggacaaatttggagggctcagttgctgggctggccctggagaatgagactgaattctcgaccctttgaaaacaggtgccatgtttgatttctttttgtgtcagcaatgcatcttctattaaaagaatggcattagggtctcagtcaagatggcctgaggcattcagttaagggtacactgatatattcctcctgctggtcagtgtcaagattctgctcctgttctctttcatccctgtgtacccatcttagatatttttgagtgcccatgatgtgctctttgttgtagtatctgagatctctagttggggaaacctaccaaagtaataaactattctatccattgttaggacaaataggaaaatcttactgactctaggagaaaatagcaggtatttctttctttctttttttttaaatagactatttcaaatcctaaagtagttttacttgatatttacagagcacatgtcataaactctatttaaaaacagaggtaaaaagggggaagcactgaaaaatataactcgagtaatcagtttcattcaaaatgtaagtgggagaatcagaatagaaaataatatgatttgcagatttattttaaatcagatctaaatttttagatttgcaaggtctgagtgaaaaaaaagagtgtcattgcttagaacttcttaggaaaacaaatcaataaatctgtaggaaataggctgtgtgctgaaccttatttggtttctgctttttgaccgagaagaagcatattatattgaaagggtatatacttggtacatagaaggaaggcgacctttaatctctgactttatataaacataaaaaccgtgaatagaaaagactgagcctaggaagaaataaaaaaggagccctgaatctatgaggctgagccatatgaaacagccataattgtaggccaaaaatggccaaacacaggcggtttctcataggccaacaatacagtcgttctgagagagcaacagcattacttttgcttagttgaccatctgattatgacagtttagaacctcatattgatgtggcaaacatgagttaacttctctattgttaatggatatgattttattctaatttagatctgatttaaaataaatctgcaaatcacattattttctattctgattctcccacttacattttgaatgaaactgattactccagttatattttcgagtgcttcccccttcttacctctgattttagatagagtttatgacacatgctctgtaaatatcaagtgaagttattttagtatatggtgcaacattttataaataacaagaaagagtatgctactttcaacaatatcatgtttaatatacataaaatatataagcatgtaaaatatatgtaacatatatacttaaaatgcatatacattatatacatttaactaagtacaaatataaatgttgcctaagaggtaagcttcaaattggaatttgagggaaataagcttcaaattcatttctcatatattcatcattttatttgttcatatgttatgttttttgttgttgttgtatgggagaggtactgatttaggttacttcttttgtagtagaggatggtagttaaaaatacatactctgaaccccatctgcctgggtttgaatcccagctctatcccttgtgagctgtgtgattttgagtaagtgacttaaactttctgcacctcagttttaatatatatgaaaaaaggataatattagtactcccttaaggttgtgttagggattacatgaattaatataatgtgtttggatcagtgcttatgttggaagcactaggtaagtgtttattattattacttctcattgtagtctcctttatgaaacgtgtgtgcatagcctgtctggaggatgactttttgtcttttaaagagagaagctgtactacttctactgtaccagaaattcatctgagagcaggttactttctcattgtaaagtccatgcaagccagataaacctatagggtagcacttccttaattagtttacaatttctgaggataggttggtgggagtaaactgcctctgagtgttcacttctctgggaactgtcccgtctgttgttgcgtatcatatgttctagtgcattttttttcagttatgtcctttcccacaaagcagtttggtgtaaccactgtaatcccagtaagctatggttggggtctatgtataggaatgtgcaccctgaaattcattcacttattcagcacaattttattgagcatctactaagtgttaggcactctctgtgtcagatatattatagataatatacaactacctaaatgcatagtaagcaagatattgtaccattgagagtagtaagagtgatgagaagagttcagggagggagtagtggtaactgttttacataggtactcaagaaaggaatctctgataagctgatctttgagcagagatttaaaggccgtgagggataagccatgtggttggttatctggaggaagaatgtcctaagcaaaagaattggtaaatgtgaaggtatgtgacttctgggatagtttgacaaacagttcaagaggccaattggctggagcatagtaaatggggattgggatcagtagtaggaggtgaggtcagagagattgctgaagacaagggcgaattatattaggtttttacaaccattgtaagggctttggcttttctctgcatgaaattcaaagatgttataaagttttaaatacagatgtgatgtgattggacttgtgttttttaaaaaaggatcactgagacttctgatctatacaagatggccagattagatattggacctgaacatttttctttgttcttcttccctaagtacaactatacatcccagacataatgtgagaggcaaccagcagaggactctgaaaggtgctaagaggaaggcagactggtttctggcatcaggaccagagaagcagcatggggcagggtatcttatgtttcccccagccagtaaaagaaggtgatcaggaccagcattttacaacctgtgacctagcaacagaaggtggttcaggaaagctccttcttttcatggagtccatccagtgtcaacagggaagcccagcaccattggcaaagggatcagtcgggaattcagttatggctagccatacatgggcagggtaaatgctcttcttcctgaccaggcctgggacttctccctctaccaagagatacaacacagggtcaccaggttgtaccagcaaaagggggcccatgcccatgacaacaagcagcctggcctgggatacctctttctccatgggtctgaaactcctctctcctgcccagagacactgagactgctgagtgacaccggtaagaggtatttcactacaacaagcgcttggcccatgaagcctatttgtctccatagacccaagatgctattctctcaccaagagacactgtagggtcagactgaaaaaaacctgtcagccctctcaggtacagggacctctggaagcccctctcatatcatctaaaccaagcagaccaaaataacacagcaaaggttctgaaaattaaaccatcggtggaatgacaacccacaaaagtagaccagaactcatgtgataaacttaaaccagggtgactacctgctaaaaggaaagatttgaatagaatttagtcttctaatatacaaaaataaaacgtccaggatacaactgaaagttgctcatcatactaagagctgagaagatcatggcttgagtcagaaaaatttagtcaacctcaagatggatcagattttggaattatcttacaagaattttaaagcagccaccataaaaaatgtttcagcagtcaaaaacaaattattttgaaacaagtgcaaaaatagaaaacttcagcaaaaaaatagaagtttttaaaaagaaccacatgtaaaggataaaactgaaaaatacaatggccaaaataaaagaacacaataggtgggttcaatagtagagtggaaatgatagaagatagtgtcagtgaattaaggacacattggcagaatgtactcaatctgaacaacagaagagataaaatagattttaaaaatgaactgagctccggggacctgtggaacaataacaaaatttctaagatttctatcactggagttgcagaagagacccaggggaattgggctgaggaatatttgaataaatcatggctgaaaatgtcccaaatttggcagaaaaacacaacctaagaatctgagcgcacctcaaacaggatacaccttagcaaatctacaccaagatacatcatgtgtaaacttctgaaaacaaaggcaaaggaaaaaaatcttcaaagcagactaagagaaatgatgcattaactacagagaagtaccaattcaaatgatagcagtttcttatccggaaacatggagaccagaaggcagtgcatctttcaatggctgaaagaaagtatctgtcaacagtgacttctgtgtccagtgaaaatatcctcctaggatttctctcagatgatgaaaactggaatttgtaagtagcagacccacccattaagattgactaatggaattttataaaacagaaaggaaagtatagaagaaggaaacttggagtatcagaaacagaaaataatggaaagagctgaaatatgtgtgcaagcaatagaccatcctatgcctcaacagtttgtaaattatatttgatggttgaaacattatgttagcatccgatactcaaggcaatgctatttaaaagtaggagtcagtaaagggacctaaatgaaagtaagatgatttccactcttcagctgaagtgtaaaatattgatacccataaaatgtaataaatcacatatgcatattgtattaggccaggtgcaagggctgatgcctctaatcccaacactttaggaggtcaatgcaggaggattgcatgaggccaggagtttgagaccagcctggccaagatagcaaattccatccctacaaaaagttaaaaataaaaataataaaataaataaaaaagatgggtgtggtgacatgcgcctgtagtcccagctactcaggaggctgaggcaggaagatgactttagcacaggaaattgagggggcagtgagctgtcactgtaccactacactccagaatgagtgacagagcaagaccccatctctaaaaaatattaaaagtaataataaaaactgcaattacttttgcaccaacctaataacaaacaaaaaccttacacttaaaaaatttataaagaaatcaagataaaatcctaaaaaatatttgactaacctccaagaaggcaagaaaaggaaaacagcagaacaaaaaccagagtaaataaatggaaaacaaataataaaaaggcagatgtaaactctaatatgtgaataaataccttaaaggtaaaagcaaagagaacctagatatagacccatacacatatgctctgctgatcttttacaaacatgcaaaattagttcaacaaggcaaaggacagtattttcaacaagtgatgatggagacattggatattcataggcaaaaaataagtaaaaataaaaaaaaaagtataaaatgaagttcaacataagcttcacacttcatataaaaatgaattcaaatagatcctagatataaatctaaaacataaaactgtaaaacttttaggaaaacacataggaaaatctttggaatatggatctaggcagagttctttgacatcaaatccatgattcataagaagaaaaattggatctcattaaaattaaaataatttctctgtgtaaaatcctaaaaagaggatgagaagacaagctacagactgagagaaagtgtttgtaaaccacatatctgccaaaggacttgtatctagaatacataaaggaccttcaaattcacaggaaaaaaaacaaaaaacaaaaaacctaaaccaaacaatccatttagaaaatgggtaaaaggtctaagtagacaatccactaaagaggatacacagatggcacataagcatatgaaaagatgtcgccttcattagccattagggaaatgcaaattaaaaccccagtgagttctcactgcacacctatcagaatggctggaattaaaatagtgacattaccaaatgctggcaagggtgtggaggaacagatcaatggtaggttaaacagtctggcagtttcttataaaactaaacatgtagttactatatgatataactattgtattatgaagcgttgatcccagaaacatgttttaaaagtatgttcacacaaaaaatctgtacacaaatattcaaagcagctttattaataatagcccaaactgaagatagaccagatgccttcagtgagcaaatggttaaataaagatggcatgtccatactgtgacatatgctactcagcaataaaaagcaatgaactattggtgtacttagcctggataagtctccagtatgctgaatggaaaaagccaatctcaaaaggtttcatactgtatgattccatttatataagagttttgcaatggcaaaattttaatgagggacaattttgtgtctgtaaagtgttaggcacaggcgtaggcagggagggaggctgctgtagttataaaagagcaacatgaggaatgcttgtggtgacgatactgttctatatcttgactgtggtgaggaatacatgaacctacagatgataaacttgtatagaattaaatacacacacatgcacacccacacacgcaagtcaaacgggggaaatctgaattagattaatagattgtatcaatatcaatgtcctggttgtgatattgtactatagttttgcaagatattaccattagggaaaattgggtaaaaggtaaaagggctccctctatattattacttacaactgcatatgaaatctgtaattatctcaataaaatttcaatgaaattaaaaggaacctccagagtagtgcctgaggactctcagtattagccttgacctcagaacatctctagacaaaagtgatagaatgaatattactttattaagagtttttcataatatattatcaccactcccttctcagtaatcagtagtataatattatgtttatagaaaaatatctcatggtatgtcaatgtttgttggtattaaaatcaaattaaaataattttacacgagagtgcaaatggctgacagatttaactcttatgtttttgtccccccaaaaaatcatatgttgaaacctaacccccacagtgatagtattaaaaggtgagtcttttgggaagtgattaggtcatgagagctctgccctcatgaatgggatttttgccctaataaaagaggcttgagagtctttttacctttccaccacatgagcattcatagaaggcaccttctgtgagaaatgggcaatcaccagacgctgaatctgccagcatcttgatcttggacttctcagccgccagaacagtgaggaatacatttctgttgataaattacccagtctaagtacggcattttgttataatagcctacctggactaagacgatgatgttaattcaaataaatatgactgctctgggagaaatgattttgggcaatatggctttattgctgctgtttctattctaggctgctactccctcctataagacacaagggcagaaatcagcaacttcaccctctgtttatgaagggtgctatgcagggcccaagtattattattattattattactatttttaaaattttactttactcatgtttgttctggtatgtgattcagctttttaaaaaacttttatttattttcaggggtatatgtgcaagttggttctatagaaaaattacaggtcccagggatttgctgtgcatattatttaatcacccaggtaataagcatagtacccaatagatagtttttcaatcctcaccctccttccactctctactgtcaggtaggtcccggtgtctattattcccttctttctggacagaaatgtgtactcaatgtttagctcccacttatacatgagaacattcgtgatgtttggttttctgttcctgcgttagttcacttagggtaatggcctccagctccatccatgttgctgcaaaggacatgatctcactcttttttatggctgcatagtattttgtggtgtatatgtaccatattttctttatccaggctactgttgatgggcatttaggttggtttcatgtctttgtttttgtgaatagtgctgcaatgaacatacatgtgcatatgtctttatgatagaattatgtatattcctttgagtatatatccaataatggggttgctgggttgaatggtagttctaaattctttgagaaatagccaaactgctttccacagtggctctgaactaatttacattcccaccagcagtgtataagtgttttttgatttttctgactggtgtgagatggtgtctcattgtggttttgattggcatttctctcatgattagtgacattcatcattttttcatgtgcttgttggtcatgtatttgtcttctgttgaaaagtctctgttcatgtcctctgcctacttttaatggggttgtttgctttttcttgttaatttaaatttgttatagattctggatattagacctttttcagtttgcaaatgttttctcatattctgcaggctgtctatttactctgttgatagtttcttgggctgtgaaggagctctttggtttaaattagatcccatttgtcaatttttgttttcgttgcaattgcttttggcatcttcgacacaaaattgttgccagggcctatgtccagagtgatatttcctgggttttcttcaggggtatttacagttttcggttttacgtttaagtctttaatccatttggagtttatttttgtatatggtttaaagaaatggtcctgtttcaatcttctgcatagggctggccagttatcctagcaccatttattgaataggcaatccattccccattgcttgttttgtcgactgtgtcgaaggtcatatggtagtaggtgtgtggctttatttctgggctctctattcggttccattggtctacgtgtctattttgtaacagtaccatgctgttttcgttactgtatagccttgtagtatagtttgaagtcaggtaatgtgatgcctccagctttgttcttttgcttaggattgctttggctattcaggctcttttttgattccatatgaattttagaatatttttttctaattctctgaagaatgtcattggcagtttgataagaatagcatcgagtttgtacgttgctttgggcagtatggccagtttatcaatattgactcttcctatccataagcgtggaatatatttctatttgtttgtatcatctctgatttctttgagcagtgttttgtaattctcaccatagagatctttcaactctctggttagctgtattcctaggtattttattctttttttgtggctactgtgaatgggattgcattatttatttggctctcagcattgatattgttggtgtatagaaatgctaccgaatttcatacattgattttgtatcctgaaaatttgctgaagttgtttattagatcaaggagcttttgggcagaggcaatagggttttctaggtactaggtataaaatcatatcgtctgcaaactgagatggtttgacatcttatctttctatctgcatgtcttttatttctttctcttgcccgattgctctggctaggacttccagtactgtgtcgaataggagtggtgagaatgggcatctttgtcttgttcttgtcccagttctcaaggggaatgcgtccagcttttgcttgttcagtataatattgactgtgggtttttcatagatggctcttattattttgagatatgtgccttcaatgcctagtttgttgagggcttttttttttttttttttttttttttttttgagacggagtccctctctgtcgcccaggctggagtgcagtggcgggatctcggctcactgcaagctccgcctcccgggttcgcaccattctcctgcctcagcctcccaagtagctgggactacaggtgcccgccactacgcccggctaattttttgtatttttagtggagatggggtttcaccgttttagccaggatggtctcgatctcctgacctcgtgatccgcccgcctcggcctcccaaagtgctgggattacaggcgtgagccaccgcgcccggcctgttgagggcttttaacgtgaagtgatgctgatattttttaaaagcctgtaatcgtgtggtttttggttttagttctatttatgtgataaatcacatttactgatttgcatatgttaacccaattttgcatcccagggataaagcctatttgatcatggtggattagctttttgatgtactactgaattcagtttgctagtattttgttaaggatttttgtatctgagttcatcaaggatattggcctgaagttttccttttttattgtgtgtttgccagattttggtagcagaatgatgctggcctcacagaatgagttaggcagaagaccctcctcctcagatttttagaatagttttagtaggaatggtaccatattcccagggctatataagaaacagagttgaatttggttgaatttggaaacagagattaaggaataggccaaaagtgatgaatacaggggcatgtaatatactttcaggaatccaaagtccagttcattgaaaaaaatgtatttgtaaatttccttttaaattccaaatgaaaatttgggttaactcagaagaatatatgccatctaggataacaataaatgagcctaacagtctttaactatctggtgatatgggattgcctgaatcatggtacctctaaacattgcaacccttaaaactcatgctatgtgtgaataattaatgccacaggaaatacttatgagacattaaatttaaaaaaggaattgcatttgtcattttttcatacattcataatgtaaaagtgtgtgtgtgtgtgtgtgtgtgtgtgtgtgtatgtatgtgtgcgtgtgtgtgtaaagaagaatatgattgggaggccgagagaggcggattacctgaggtcaggagttcgagaccagcctggccaacatggcgaaaccccgtctctactaaaaatacaaaaattagccaggcgtggtggcatgcctgtaatcccagctactcgggaggctgaggcaggagaattgcttgaccctgggaggcggaggttgcagtgagccgagatcatgccactgcactccagcctggccgatagaatgagactctgtctcaaaaaaaaaaaaaaaaaaaaagaataagaaaaaaagactagaaaaatgtatgtcagaattgtaacagtgctttgctttggggaatgctaggaatgtgtgtgggatttagtttctttccaatgccattgtgcatcttcagatttctttatgatttctttaccttattgttgaaataaaaaaagcaataacaatacacaattattttttaaaaggaagaagtttaagcaaagggaaaactagcatatgacaaaatagctgaaaccagaggtagagcttataagccaatatgccaaaagaccctgcacttggcctttttagtccaagtgatctatattttagctgagtttcctagaagtatatacaaggattctcagtggtgactagaatgaacagactagctgttcaggaatctaatgcctaccatagctattaatagctaccactggctgttcgtggtggctcacacctgtaatcccagtgctttgggaggctaaggcaggaggatcacctgagtccaggagtgcaagaccatcctgagccacaaaggatgtctacaaaaataaaaataaaaaatatctgggcatggcgaatcacatctatagtcccagctacttgggttggtgaggcagaggatcacttgagcccaagagttacaggttacagtgagctatgattgtgccactgcactccagcctgagctacagagtaagatcctgtgtctaaaaagaaacaaaaaagctaccactaatactgatatttaagagatttctccagtatatacccataaagatgaaaaaccacatcttttagtgagtgacatccctgtaagacacaggggcaatagcgttcacaggaattagtctcatatcattctgagacacagatcaaaagtttttcattactagcaattctagcagatataaaaccatgtgaaccaggtgtgcagcagctttccagtgttgagtgtgaaggatgggtagctctaatattccctttcctgtggcatacctctttgcagtttgactttgtagatcctcccattgagagttggagactatttcctcaccctttaaaactaggctggggttgtgagtttctttgtctggtaaaatgtggtagaagtgatggtgtgtcatatctgagcttggtcttccagtggccttttgtgtttctcttttatcctgtggacccctacgtctgtcaagagaacaagctcagattatcctgccatcctgccagaagatgaaagatcatgtggaaaagagacgagtcatcctataccatcaagctcccatttgacttgccagttgatcacagttgattatcttttttttctttttttttttttttgagactgagtcttactctattgcccagactggagtacggtggcacgatctcggctcactgcaacctctgcctcccaagttcaagcaattcttgtgcctcagcctcctgtgtagctgggattacaggcgcccgcaaccatgcccggctaatttttgtgtttttagtagagacagtgtttcaccatgttggccaggctggtcttgaactcttaacctgaagcaatccgcccacctcagcctcccaaagtgctgggattacaggtgtgagccaccgtgcctggctgcacagttgattatcttatttgcagccactgagataaaatttgactctatatccttaactaactattagaataaccacaaatatgactcttctggttaaaaaagaactgttttttttggtatttgagcccgtgaagctgcattcagctgagctgggcccagatcagcagaaccattgatatgtcccatacacacatgagcaaagatgaggctttgctgtatgctgttgagcttttgtagttgtttgttatgtggcagtgttgcggtaatagatacatgatccatctggcttcatccttgtagagaaggagattggctatctttccttcagggttccagtcctggttcttcctttaactagctatgtggctttagcaaatattttaacatcattaagtggcatatgtaaaatggaaaaaaactaatttttgtctaactcacaaaattgctaaagtgaagtgaaatatatgtaaatgtatttattatctatacatcacaaggtaaaatttgattaatctaaaactctctgctctgtaataatgtactacatttaagtttttttccaatgcatttgatctttcagctactacataaaagaaataaacaaacataaggactattctaatgccatgccagtcacagtgttaaaataacttaggcatattttgataccccttgatatgtttatgatgaatttgaaatatactagagaagaaattttgtttagttttataagtgtggcttacagaaggagactttaaataaaataaacccaaacaagttttgatttactcatggacatgttttagttcggaatgtcaagtatgaatgtccgtctccagggatatcagggtgtgaatcagatgtgcatgtttcacaatccacaggtttccatatgtttttgaaatatagaaaaaacttcactaatttaagcttatcagcattcaaagttatcttatttgcagccactgagataaaagttaactctgtatcctaactagcttactatttgaataaccacaaatattggttaaaaaagaaccaaaaatagttatcttggtttgactgtaaactgcattcttccatcttgaaaattttgaatttttctagattttcaatatgtttttggggtaataatgatatgtaatattataaaatttgaagtaataataatgaatgaatgaaattaaataaaatggactccagataccttcacctagagacttatgctgttaattaacttttagagactacaaactcaggtatcagcctgtgcatatatacacatagaaagataatgcataaataggagtgcttttagaacaactagaatataggatgcatactaatttaattaacatcttaaatttaactttacttgaaattaagcataaaaaagaagctgaatataatctaagtggctgaactctagcaacaatttcactgcagaataagttgtttctaaaagatccctctaaagttcataagaaatgattatgaagaaattgaagtttacatcattacttatgtaactaaaaattttcctttaacctctctaattttgttatgaaagacaaagaaattagattaggtgggcttcttttttactttaccatctcagcctctgaatttgttagttatattatttttatatttttgaggcttctgccctgctaggatgctttgtggcaataatttctgaaattcttcaaacttaattttatcagattttataagaaacttagcaattcaattaaaattggaaatgcaaaaagtcttcagttgcataagaaaacccattcatgatagtagaaatgtaaattgtaaccacactgagtttccatttcttacctatcagattgtcaacatttcgaaagtttggcaatacctttattattattattattattattattattattattattatactttaagttctgggatacatgtgcagaatgtgcaggtttgttacataggtatatatgtcccatggtggtttgctgcacccatcaacccgtcatctgcattaggtatttctcctaatgctatccctcccctagccccccactccccaacaggccctggtgtgtgatgttcccctccctgtgtccacgtgttctcactgttcaacccccacttatgagtgagaacatgtggtgtttggttttctgttcctgtgtaagtttgctgagaatgatggttcccagcttcatccatgtccctgcaaaggacattaactcatccttttaatgttaaggctgtggggaaacaggctttattatgcattgctgggaggagtgtagtttagtgatatctaccaaaactacatgtgcttagcttttgacccaataatttcttttctgggcatttatctttttatatatatctgcatgtgcacaaaaatgatgtgtttacaaggttagtcagctgagctgcttataacattctaacttacaaagaacctaagtgtccatcagtaagggactggttaaataaattatggaacattcatacagtgaaatatttttcagctaatggggagcagaaggaaaaggtagagaagggaaaaagaagagatctctgtattgatttaggaagatttctaaggtatgttgatcggtaaaatgttcatgtccagaaagtgtgtgtaaagagataagattatatttgtttgtgtatatatacatatatttatttattacttattttatatatataaacactttatatataaacactttaaggaaaatgtttaccttgtgtgagaggggacaggagaggaagggcactgggagactggtaactctgtctctttaatttgtttttatttatttatcactaataattacttattacaaaaaagaatgttaaagcattaagtggattcattctgaacagcagtgctttgtctcagactcctcattcatgacttctttaatttgattgactttttggttagctagattttgccgtctagttaattttaaaggaaatgaatgaatgttctgtttcctaaattgctgcatgaatgaggatatctatcaaaattgtgtgtatcaattctcccttgaaaacctttaaaatcttttggtctcacttgttttctacctcaaaacgttgttagtagtattccagtgtcctctggaatgagattgtggcactttcaaaaagtagagtttttcaccctatacttcgcttttgtttcagtgaattttttttgaggtggaaaaggagctcactaaaatggtttatactttctgattttatcccaaagtttggatttctttttgggttatcttttaatgttgcattattttgtggattttagctttctaactttctgttatggaatatactcagggaagtgttttacatctggagagatataattcaaaattttctctatgtgattatttatacatttttcctgagtgtgtgaaataaatttaagaataatctgaagttttgtgtttgttttagttgcatataccttgaaattgatgttaattgatgttgtctttacttttactatattgtttaggttatgaattgtgtgagtattctctaatggagaagtaggctgtttcatgtctttattctatattgactgtgacataagccttgtagagaaagtttttctatgtgcagaatgtacaaaatgtcttgcaaatctctgtgagtttgcccccgtgatgcttgtttcagcatcatgactgaaacaataaaaggaggaacatcatctagtttctctatttgcctgtgataagtccagattctctgagaagcagacatcatcatgggattaaatgtgcaaaaaccttattagagagaaaacctgtgcgagtgaaaaaagggaggcagctgggggcagctgacagagccctcagactgtgatgcacatttgaccctgagtgaaggagagagggagacaaggttggttggaagtgtcctggactggcatgaagtttcaggaaacctgaaggagcatcaaagttcacagttagaggagtcccatatctcctaggaacaggcatgccttaatctctctgttggcagtagtcattgctgggagtgctagatggccccagcctaaatggggtgatggctttcagaactaagcaggctgagcaccttggtcagcagagatccctatagggattcttaccagtacatctttctaaagcttatatgggactcttcttactttacatttgttcttggatgacctcatccactactatgaggtgaattatcacctagtctcagtctgtagtcctgatcactatctttacctggcatgccaagcctattttccaattgccttctgtgtactttgctgccctgcaaaccctcagactcaacaccccatgatgaacttatgatccttcacctcccccagtcccaccctttattcctgtattagtttaccatgtctcctttcttcccctttcccatattgaaaactaggagtcacctgtagctcttcctctccttcacatcaaatatccaaccagccaccatgtcctttgcatgtatctaaagttctaaactctggtgcctcctcccatttctgttatgacagttctaatttggttcatagattcttctttagaatcacatactttaagatggagtttgccactataggtccatcgtctattttttaacagtagtgactggcaggtatctctccacttcctagagttttccttgctgatctcatcctcagccattcttctgcacttagacttgtagaaaaggtccagatctgcaatgtggatgctgttggagtgctggcattttttccttctgcttctcacacggatattatgaatgataaatttttatgatggatgagttcctgacaccagagccagcaattcctactccccatatagtaatacagaaagcatgaaaagtagataactgaatctatgagtgcataggaccactacatatttggtggtggtggtggtggtggtgttatgtgtgactgtgtacatatatgtatgttaaaactagatatgataaaaccttaccactttattgctgtatgaatcagttatttgtgtaaccaacaaccacagaatctctgtggcatgtaacagtggttgttatctctagctctctcatgcgtggcttggctgaggtttggctgatttaggctgggctcacataagcttcacgtcaagctttgtcttaggcattttctgttccaggctcaggatgtgtatgaggctctggtcttcccaacatgtgtttgttgtggggcccaggtttaagagccagcagccatgtgaagaagcttcttttcatagatggcaaaatacaagaaagcaagaccaatggcacaagtacatttgaaatctttccttgtgtactgtccactaacattcctttggccaaagcaagttacatggccaagcccaacatcaaatggtctagtgggaggggctacaaaggaagtagacacagggaaggatgaagtactgggaacaataatgcagttgaacacaattatgatgattgctttccataagaagaaaataaatagaaaaaaaattggggttggttacgtgcaaatgcctttcctgctttatgtttaagtctaattagcagaggagatgcattttcctataaaaattagaaactaaaagaggagcaatgtggattgctagacagaagtatgtttatgacattattatgtgctaattctttcttaagagtggccatcaatttataaacttccacagttcttttggaaacttcctgggaattgtctattttcgtccatgtttgtaatctctgagccatataaagagtgaagtgtattgcgacgttttcactttcaaaactattcttagccaattttgttagggtcttataaaatgtgctaaagagtcaaacgttaacatatcagctttgaatatatcaggatatagaatgtcagaagttaaacttagaattcttacagtattgtgtagcagactgctaaaattagtatatgattgatgacattgtgatttgataggtaattcaaatattttgtaagtgtttcagaggaaaatattgctataaagcaactgatttagaaattgaaatgagaaatgtcccaagaggtgaatagttgtaatatttattcaaaagtaatgttgcctatcctgctcctgataaccactatttcattctctatctctgtacatttgactgtttccttctaggattccgcatataagtgaatcatgcaatcttttttttctgtgtctgtgccagacacagaaaattatgcttatttcacttagcataatggcttccaagtattgtgttcgagatttttgctaagtgaatagctatagctgcttttgccattggagagttgggggatgggtaactatgtgagatagtggatatgataatttgtttgactatagtaactattttaatatatatatatatataaaacataatatcatgttatataccttaaatgtgcacaataaaatgtattttaaaatatggcctaaatgaacatgatgtagggtttcctttattagtattaggaaggattttaattgtgcatgtagatataagacatttccatatgaaatttatataataacaaagatattacacaaggaaaatgggtctctttcacttctacacctgaaatgtaggcggcgacacttttatctagtcatagaaaacacaatgaacttgtggttgaatgtactcaaattttctatcaaattacaaaatttgtcaaaactgtaacacatttatcatccaaattgtcttaagaaacgtgcatatgacaatgtctttaattttcagtcacccaaattttcaacagttgtattattcacagtgagattcatccaacaaatgtatatccatttcaacttggacaattttaagaactgacaactttccatgtatgatatttgtcattctcagaatcccttagaaacctcaacacttaaccatttaccatgtttcaagggaatgtttttccaggaaaaaaaatgcacaagtgtgaaaaagcaggagaaagagaagtgcagttttaatagaatgtccaagatttaaggttatgatatgaaaactaggtagcatgttcttagcaagtcttgaattaatggcaaacttatgacttcattgattttctttaccccatcccctgacatataaatatatgagaaatatagcttccataccaacacctaaagacagatttcttattcaatttctttgagaaactaaattcaatggcagatgacagcaataccagtgtactgcagaagtatgctctgcattcctgtgttttgttcatggtatacattcctaatgccctttttgtgaaacctggttaataattaagcaagtcaggatgtacgaaccacctgaaattctcggataagtagtttcttaatatctctttttgtacttgctattgaaagtatttagagttatttttgcttgattatttacaattttacactttctttataaactaatttttcctaaataccctagtgtgattttaaagtttgaaatgccttaacattctccatcagggacaagttatgttttgtagttagcggcttgatacccacatgtagctctgtgtttatgatggcagagcaaagtgaagattgcagacaattatcttgatggtcaggcctccaggtcagctggctgctgtgtttacagataaagtgagctggacattgggaagtccactggcaacttctgaaatacataatggtctaaattgccttctattctcagggcccaagccacttgctagtgtaagttggctatttaagggcgagcattaactctcgtgggtcaccagggaaccatttaataagtaactagaggcctggagatgttcacgtattcctctaaatgccctggttttgttactggtgcagttcactcaaggtcattctgcagcttcaaatatttaatgtcctttctcaagtgaatgaccgggtccggtggagaagctggctgatttgttatttgtagtcagccagtacatagtaagctaatcaagttcataataattatattctggcaagaaaaagctgattaacagatgtagtaggagtttagagaggctgaaataaatccgagttatgataaaacaacctcattagagaagagtatatacatgcataaggattttgagctgaatacctttatggtttttttgtaacttttacttttgacataatttcttattttttattttttattttttaatttttatgggtacatagtaggtttatatatttatggggtacatgacatgttttgatacgggcatacaatgcgtaatgatcacatcatggagaactgggtattcatcctctgaagcatttatcctttgtagtgatataatttcaaacttacaaacaatttgtaagatcaagacaatgaacaactatacatccttcacacaaattcactgattgtttctcatttttttccatctgctacctcattatatctaccaagatatcaatccacttaatttttttttcctgaaccatttcacggtaagttgcagacaggatagcccttcaccttaaataattcagtgcatatactccaagaacaagaacattttttacgtgaccacagtgcataattatcaaaatcataatggtgcatactactatccagttgtggtgtatgattttaatatgttatatagagagaaacaaaaatgaaaatgaatgactactattccaaaatgcgaacgtgtgagttgcattgggacagattagtatgctctgtaaaggggaaattaagctgacttaattatttaagtcatgtattaagctaaatttcaattatgaaattactggatgatccaaatacatattagatgagggtcagtcacttattcaataactcatttgcctattttagtcaatgctcaggtgtcttgtttttcctaatgacttccaaaggtgatgattactggcacttactcaagcctaactttcacataccacttgtaaagcaggtttgaataaaagatgcaaggaaggttgacttcaatattcagccataactggacctcttggtgtgttggatttctggttttcagtatataattcagtataaatatagttaggatacaataaaaggctgatcaaatatgtctaaaggagagagtcagtatagtaacataagtaatatagacaaggcatactatttgaattttggattttaaaaaatgtcatccttttattcagactttctaatggtgcactattgcagtgataattagcaaggttaaaagcctcttcctgaagactttagggagatgcttgccattagaataatctgtttatacctatctcatgtttgtttttacagcctgtgtttcaaagaatagtattaagtctgatggattttcttgcccgagaagctaatttaaaaaaatcgtattcactaggtgaactgcagactgctaaaaggtgggactaagatgaacactaaagaacaacataaaggacagatatcactcacctgtgaggatttggttagcgatgtgggaggagagccttcctgagtatcttaacatcagtgcttctctgaaggcattggtagattttttttttttttaagaatgcaacatcatctgcaacctgaagtcagttctggaggcaggatgtacctcatccctaagccagttatggaggcaagactgtactcatatcactgtactcacatcatttacaaggagtaaatgctacataagtggcaccagtgtaagtatctaaggattcaggggatggggagatatcttagagacaaatagagcagacttaaggaattggataggtagaaaggagggaagagaataagaaatgatgtaaataaaaatatataactgcagagaagcagataactgttgaggagtggccaaatatggaggggggctaatgtgtgtgtcagggatttccagtttccagttctcatgaaacaggatgggggctaaaggagtggtctctaccatccagttagtagaacaggatgtacataatgagtggatacctttcaaatattcaattacattcaaaattttgctaaaacatttgttcatgcacatcttgccatagtgaagtccagcccaggaatttctgcctttgcatatgaaatgggatataaccagagactgacaaagaacattcaggataaagagaactattaacttgacacgtattttgtaggagatgctgtgggaaaataggcacattcacatattgctggtgggagtgtaaatcattacactacctataggagggcaacttgatgataactatcaaaattacaaatatgccctttgccctgaaagtccagcttctgtaatgtatcttacggaattacttctgtacgatgcataaaaagcagaatattaaatcccaaaccaaatatttgaaaatggaaactggtcaaataaaccctgccagccatagaatactatgcagctgtaaaagaaaaaatttttaaaaaaaaaggagaagaaaaagaggaggaggagaaagatgtgctctatgggttgatttggaaatatcccctagaaagaaggcaagaataatcacatttgcatatatttgcataaaggaactagaaggagatataaaaaacagaataaaagtgttttgtagtgggtggaaactggtagatggagacaagggtgggtgtgaaagtcttcactctgtaaaactttttatacttcataatttctgagctgtttctgtactagttaatggaaaaaatgaaaagagaactattgtgttcttataagaatggcaaggactgctaattttctaccctaacatttattctcccaattgttttttattttaaaccagaacattgccctgtagacttaatgtttccagcttctcttgcagctaggtgtggttgaggtcaatgaggtatagtaaatgctgtgtggtatatcttggtactttttaaatggatctgttaagctatgagggtctttctgccttgctttcttctttccaatatagatgtgatgttcagaagctcagcagacatcttggcaatgaggggaccttgatattggaaaccatgtgctaagaggacagagaaagacagacccatgagtcccgggtgatactatggtgccaacatactggctgcttcttggtttctcttatatccaagaaagaaagctctaccctgtgtacatcacacttattttgatctttatggtgttgattaggcattggagtctaatccagtatttgccccaaatgtagaatactgtttttctttaagatcttttctttgcaaactttgcttgggccctctaagcttgtgactttacttcaaatccagttccactttgggttgatataattatggcatgtgaaaagtgtttctggagaatcatgagatgtgactattatctggtaaagtgtgttgcagtccaaagtgccaatggtggaaaaactcccgtaagtgcaccctgtcatttttctttttaatttaggtgtacagctgaatttttaatatttcatatgcagttaaattaaccatacttcttgtgtcaaaataaatatgcagaatctcaatcatggacttaaagatgcagaaacacattgattttaggaaaagtacatgtctcttttattaccacacatataattctggtaaaaattatgatgaataatagagaaaaaatatggaaacatggatgaaatttgttttatagatttgcaggatgcttgctaacatggtggtagggagggctgatgtattttcagtctgacatctgttaatgtgactataataaataaactgtatttactaagtaaacattcaacttttctctcaaaaagatttggtagtaaaagaatatgtcattgtctcattgctggaagcctcatactttttcatattggatggggaagggaattccattagtggtagcacaagtccatctgtcttacattagacatttgtctaaaccaactttgctcactgaaaagcagtgtaataacaccactgaagagagttcttaatagactgaggaagcaaacaaattcaactggtgtttcataatatctaaatttttagacctgagatcatttctttggattcccttctacagattttaatttgcatgcctgatttagcagcctctttccctgctttaagtagaaagtagaaataatattttaaaactaatttttacatctttttttgcattatggagatgggctttcctgtgtgctattagtagaaaatcttttaggaaaataaggaagaaaccatgcagagggacataatttttcaaaaaaggctcagaagatatagcagtttgtctttatgtttttcaagttaagattctcctatagatatattaaacctaatccccaatgagagggtatttggatttggggccactgaggggtgattagggcatgggggcagagccctcataaatgggattagtgcccttggaaaataggcccaagagaactcccttgcccatcagccaggtgaagacacagcaaaaagatggctttctatgaaccagaaaatggccctcatgtagtgtgtctgcatcctcttcatccaacttcccctaacatcttacatgaccatagtccaatttttaaaagcagaaaattaacattggtacaatactgttaagtaaacgagagacctaattcaaacattacccatttggcaactgatggattttttattctagaatcaactcaattttcccacagtgaatttaattgttgtgacgttatttagtcttctgaaatctgtgacagttccttagtctttccttgtctttcacatccttggcacttttaaaaagtattggtcagttactttatgcaatgtctctcagtcttgatttgtatgatgttttctcatgattatattgaggttctgcatttgtattagtcgattctcacactggtgtgaagaaatacctgagactgggtaatttataaagaaaagaggtttaattggctcacagttctgcttggctggggaggcctctggaaacttacaatcatggtgcaaggtacctcttcacagggtggcaggagcgagaatgagagcagagtgaagtggggaaaatctccttttaaaactacaaaatctcatgagaactcactatcaaaagaacagcatgggggaacccgccccatcattcaattgtctccacctggcccctcccttgacacatggggattatgacaactcaaggtgagatctggatggggacacagaaccaaaccatatcagcattcttggcaaaaataccacagaagtgatgctgtgcctttcccagcacattctatcagacagaaaatgatattttgaaataccatttggcagttggctctttgaccaatttgcctctaattcaaactctgtatcattattgagcaagcatttagtagcttgaaattgtagctgcatattctccattttgctcacaagtgtatcacatttagaaagaaagatgggattacttttatcaactaatctggtgtttttttctacctctgtagaaatggaaaataaaagctcaacatctgattattgtaggtgttcttactagctgggttaggaaaagggataaagatacatgtgctgcagtgcgtttatagaggcaggtgatggtcaagtattctttgatggtcaagtactccttctgtctaacagcctcaaacaagctccttttctttatatatatatataaaatatatatatttttaattatactttaagttctagggtacatgtgcacaacgtgcaggtttgttacatacgtatacatgtgccatgttggtgtgctgcacccattaacttttcatttacattaggtatatctcctaatgctatccctaccccctcccccaaccccacaacaggccccagtgtgtgatgtcccccttcctgtgtccaagtgttctcattgttcaattcccacctgtgagtgagaacatgcggtgtttggttttttgtccttgagatagtttgctgagaatgatggtttccagcttcatccatgtccctacaaaggacatgaactcatcattttttacggctgcatagtattctatggtgtatatgtgccacattttcttaatcctgtctatcattgttggacatttgggttggttccaagtctttgctattgtgagtagtgccgcaataaacataagtgtacatgtgtctttatagcagcatgatttatattcctttgggtatatacccagtaatgggatggctgggtcaaatggtatttctagttctagatccctgaggaatcgccacactgtcttccacaatgtttgaaccagtcccaccaacagtgtaaaagtgttcctatttctccatatcctctccagcacctgttgtttcctgactttttaatgattgccattctaactggtgtgagatggtatctcattgtggttttgatttgcatttctctgatggccagtgatgatgagcattttttcatgtgtctgttggctgcataaatgtcttcttttgagaggtgtctgttcatatcctttgcccacttgttgatggggttgttttttttcttgtaaatttgtttgagttcattgtagattctggatattagccctttgtcagatgagtagattgcaaaaattttctgccattctgtaggttgcctgttcactctgatagtagtttcttttgctgtgcagaaactctttagtttcattagatcccatttgtcaattttggcttttgttgccattgcttttggtgttttagacatgaagttcttgcccatgcctatgtcctgcatggtattgcctaggttttcttctagggtttttatggttttaggtctaacatttaaatctttaatccatcttgaattaatttttgtttaaggtgtaaggaagggatccagtttcagctttctacatatgcctagccagttttcccagcactatttgttaaatagggaatcttttccccatttcttgtttttgtcaggtttgtcaaagatcagatagttatagatgtgtagtattatttctgagggctctgttctgttccattggtctatatctctattttggtaagagtaccatgctgttttggttactgtagccttgtagtatagtttgaagtcaggtagtgtgatgcctccagctttgttcttttggcttaagattgacttgacaatgcgggctcttttttcgttccatatgaactttaaagtagttttttccaattctgtgaagaaagtcattggtagcttgatggggatggcattgaatctataaattaccttgggcagtatggccattttcacaatattgattcttcctatccatgagcgtggaatgttcttccatttgtttgtgtcctcttttatttcgctgagcagtggtttgtagttctccttgaagaagtccttcacatcccttgtaagttggattcctagctattttctgtagaacctcttctccattcaaggttgcagaagtctgtgacaaccaaggaaaagagacagcaatggggctctcttacctgtgcctaggaagaatcttacctagtatcttcttctgctaggaagagagaacagatgtataggatgaagtatctcaccttttgggatctttttttaaaataatctcagaccatgtaaactccagccatcaagggaaatgtgctgattcccacagaccgtatttcttttcttttttttatattgcctcagaaagagaatgcatggaactgctgctgcttcaaactagatatctgacactagtgctaatggctggtttctcagctaatccacctgtccttcacttctgaagaactgaatgatagtctttgtatttccaactacaattacaaattacatgaagcaagaacaaatttttagttttatgattatgtggtaagcatttcaataaagctccacaaatgatggaaagtgtgaaggagagaaagagggagagagagaaagacacacacacagacagacagacagacacacacacacacacacacggacccattacccattatctggacagaaacatcttaatttgcgggaacattaaaaattttttttctatgtggctatacataattatttataaatctacaattttatttaccaaaagtgtgtgtgtgtgtatagtgtatacttgcttttaataatagatatattttccttgacaatgaacattgagcaaatattatcatttttaaaggctggacagtagccccttctgtggatgatctgtacctgatttaaaaggtctcacattgatggaaatttcgccattgtcggcagcgctgtagtggacatccttgcatgttgattgtgcattctactcagatgtttccctttgggtaaaagcctagaattggaattattaagtcaagtatataaaaaattgagtcttattgcatatagttaaattgtctctcagaataaaactgctccaatttcaacttccaccatgaatgtatgaatgtgcctattgccatgaatgtttgccgaaataaatctttggcaatatcaaaatatatccatgtagcctctattttatttctttattttgaagttgagcctccttgcctaagttatttttcctattatttcaaccttatttggtgatttgttgcttatattttaattagtttgtatgtgagattcttaatgattttatatattaaggatcttaatgatttttcagtaactgcaaataatttttctagtttataacttatcttttaactttatttgcttaaaatattacttctgaaataattaaaaataaactacataatgaagatctttgtacgtactaatatttaatatgtgataatgcaacaagtatttgtgaatattgtaataggtaatatcttaagcatttacaaatgttaacttattttatcctcataaaattatttaaggtgtatcctgatactaagtcgattctacagtgagcatacttaggcacagagaggttgaatatactgcctaagtttacataggaccaagtggagaaactgaattcaaagccaggcaattacctttagagttcttgttcttgccactgcattttataattggttaaaaaaatatttatttattccggatattaattcattgtcactcatttgcattactaatatcttctccctcttggaagtctctcttttaattttgtttatgctatattttgatatacacaagtatgtcatagccattatatgattataataatgtgatcagccttatcaatatttttcttcctgggtattgtttttgcagcatactagaaaatccattgttactcttatgccatgaaataggccttaatattttcttccaaaaatcttgaattttcatttttaacattcagagctttaatctacctggagtcaatttctatgtttggtatgataggaactgaattatacctcttttgttatagaaaatgtgtaccatcagcaatatttatcaatgtaactaactttattaagtccttgaacttcccattttatttctatgtgctttcaaaattttattattacagagaatgaaattgttttattgcctttcaaaattggttattcttgtgtataggaatgctattggagcttagaatattgatctagtaacccagtaaccttgcttaacaatcttttgaattttaatagtttttttctgaagatcctcttggattttctatgtagaaaattcataatctatacatcaccacacacttttccaactgttttaccattttatatttttctcatctccttgaattatcttgggcctctgataaaatactgaataaaagcagtatttatctggatccgtgtattttctctgatcttacagggaaggcttcttgtgttttaatattaagcataatatcagctttagatttgtagaagatatttcttaacagattaagatctgttcccttttatgtctgattcgctgaaggatttagaaaaattatacataggctaagttttgtcaaatgacttctctgcatataataaaataagcttttctcctctgctgcaaacttcttgctaatattttattttgcatctatatttgtaaggcaggcccacctaggattattatttctcagacttttcttgttcaatatcaagataataccacttcatagaataagttagaataattgtcttatttatttgggtttctttagttagttatttaagctttgttatgttcccagttcttctcagccatttactactagtttctgtcttgtgtgttttatttattaaaaaaggacccccctccagcaatagtataaaaataatcacctctgtttttcttatattttgaaatattgtgggtttttttaacctttaaatcttaaatagataacttagaattggcctctccatgtatgtaatcaaaatagggttatacaattcttattttaaagccagaggaaaaaaatccaaaaatttttttagcaaaaacttcaaatggattcttcatgatgacagctggggtgcccaagagaactgctattggtttcaggtttaaaataaacctgaatctctacgtaattcaacattatgatttggtacttaatgcaaaagtaagccttcaactcaacatataactggagaagaaaaatttaattccagaagctttccatctcatataggttattactctgccagagtaaggatttactttctcaagcagttggaattcccaagcatactgaagcaagttatagatagcctgaaaagcaatgtgaaaagcaatgcttcatctctgaagcaaaatttcctttcagctttacaatcaatgatgctatcagtgacatggtttttaaattctcgttgagaaaatttaaaggaaaatgttaactttttaaatgagcagacatgaagaacacagtttacctacaacatgaatgaagaagtatagagttattgcctgtgttgggttttgtagatccttcttgattcctgcttatatttaatagagatgtcagaatgaaaatgtccaacatggttaatattaatcttattcctcagccagtatattcaggaaggcagtatagttattttataatgttgttcttttgtttgtgtattttgttgttgttgttttgagacagtgtctcactctgtcgcccagactggagggcagtggtgcatctctgctcattgcaaactccgcctcctgggttcatgcaattctcatgcctcagccttgtgtggtagctggaattacaggcatgcgcaccatgcccagctaatttttgtaattttagtagtgatggggtttcccatgttggctaggctggtctccagctcctggcttcaagtgatccgcttacctccgcctcccaaagtgctggattacaggcgtcagccactgcgcacagcctataatgttttttttacagcatttatttcttggcttactttttattcctgttaatgttgatattgtaccatttggaaattcagctattttatgtgtacacacatatgtgggcactttctacttagtctgtttctacagtgatatctatctttctgtggatatttatgacagataggcagacattcaaatgcagaatacatcaaggtatttgttggactagataatatcaatatcacatggaataggtttgcttgcttgtttatttaattcaatcgcatatgttgagagtacagtgtgtgccaggcaatgcattgtgttctgggatcccacacagggataaagacctcataatggtgggaggtagatggtttgcctgcaataatcacatcagacaatatgttgactgatagtccagtgtcatcaacaatgtgtcgagggagcacagggatggaaataatttgttttgcagggacttgagggtgaatgtgggagcagagatgaggaagaacacgcagagaaagtagaatttggtctaggccttgaagagagttgtatttcatatgagggggagcgagtcaaaacactgaatcaccagggtactttgcttctttagtgaatgggaaatattatagtgcacgtggcaagtagtgagtagtgattacggagcaggaaagtttaagctggaagagctcagtcattctgggttgtatgcacacacacgcgcacacacacacacacacgtacacacacagaggcagtggcatggaggatcatttggaagctggagaaagtaaaaatcactagagttgaggatacagatgagaatctgagcaatgggagtagtctgaacaataggaacgtgggaccgacataagaaagggatggaattgatgacaaatttaatgtgggaaataaggaagaggaagaagcaaagatgatatggaagggtctagcttgtgtgaccagatggaaagtgactcattaatggaagagtattaggatggagaaattgttttatttttaaaataatttccagtgtagtgatgaaaagaaaaagttactgaattttattttgaacatactgagtttgaggagcctgcttaactatttaggtggaaatgtcactttacctaaggaaaatgagtttgggctctgaaaagagagaagtacatgtcaccaggccgggggtggggtgggggatgattgaagccaagggaggagatgtgcttgttcagggagagatgcacagacaaatcaggttcctgaaaaacagaaacatttaatgcatgatgggagggatctattgtcttgctgaagaatgataagtgagatgcagggagaaaacttggaggacactttattgaaaattaaaggacaaatgtttctggagggaagaggcaacaaaataatagatggagattttttaatacgtgccttagtgttcttgcccttgaattggtacaaccctgaagcacattgcatacagtcttccagaatcccctgcaggattcagccccagttgcccatagtgaaggacttgtactttataacacctttcattgccttccatcccttctctgtctcacttctcaacttccctcttggtgccttctggggtcacctcaggataacctacttgcaaccaaatccttgcatcaggatctacttctgggagacaaaatacctaagacaaaatagaattttggtttctttcttcctaagaatggactggaatgggttagaaggaagatgaactgtggaaagagagagctaagaatgacagggtggggaaataattgaatacgtagtccggtgtcatgagcaatgtgtcaagggagcagagggatggaaataatttgttaaattattaacaactaaataattggagttggaggattaggggcttttcctctctggagaaacacaggaaaagattggagtgaaggcacataatgttagtggtgtgatcattcttgatcattcatcctgtcatttctcatagaaggagacagaattgtttactgaactcaggcatcttcataagcaccctaggtgatatagtttggatgtttgtcctgggctccaatctcgggttgaattgtaatccccagtgctggagatggggcctggtggaaagtgtttggctcatgggggcagatccctcatggcttggtgttgtctttgtggcacctccttccacccaaccttgctcccaccatgtgagatgctggcttccccttttgctttccaccatgattgaaagctccctgaggcttccccagaagccaagcagatgctggcacatgcttcgggtacggcctgcagaaccgtgagccaattaagcctcttttctttataaaatacccagtctcaggtatttctttatagcaatgcaagaacagcctaatacactgggatagtccattcattctaagtctgttgttattcaacaaatatttataaatcatatcctatgtgtcacacctatgattttctgccttaaataatagggttccctttcatcattttttttccttgccacttatttgacaatactggttgcttctgctttctgacattgaattcagttaatcttattctgcttttgccatctgtgataataagttattatcctagaaatatgttttgaatttaaactgaatatccatcttgaagttgccttaaattctttatgataaaatccatttagcataataatccgaaaagacagagtgaaaaaaacattatttaaaatagttgatttaatgttgttatgaaatataacaggactcttgaaaaggtgattaatattcttacacatgttgaaacagaacaatatgagttttttcttatctacttttcttatctggtcttctctggcttctaactttattagcattcgtatattttattaattaaaagtcttcttgatatacattctgtgaaatacttatacaaaaacaaatatcaaacctgaaattcttcaagcttctcgatccagctactgatttattgaaaacactgagaagagaaatgtatgattaaatgatgtaggatgaaatttgtccatactatactataggaagtaggaaaatcttcaggacaatcaatctggtttagtcaacaaataaattccaagaaaaaaataagacagaaggggaaacaatagtttagaacacatacagctcatcttaaacaattccaatgtatggctttcatttagattgggatttttaaaattatggcacttgtgagataatttgaatattgagtatttgatgatatttaggaattactattaatttgctttaggtattttagttatttgcaaaagagggaaactacaccgttagagatacattctgaattatttacaggtataattatatgatatctgggactggattaaagtagaataggggcatgggagaaggggttggggttggataggatgaccacgaatgaatggtttttgaggctggtttatggctttgagtgtgcattatactattaagtttacttttgtgtatattcaaaattatccatgataaaaatggaaaaaattaaattaatatataggtagatcatcctcagtgtatgaataaattatagtttattttttccaataaaaactttgttatgtaatagcatggtttcttaaattcacctgttcgatagaaataaggttaaacaagttcaagaatcaactaacatcctcctacagtaagcttcattgcaaatccagttttgacctttgctcaaagaagagaatgagaaaataacacatttgtgtgtgctcttttcctgacctatgacttgtatagatgttagcacagtggctttggttttaaggtaaacattctttcagcatttctcatccttctcccattttcctgcatttctcatccttctcccaccttcttggtattttaatcatttatgtattgtgaacattttagataagatgtaaaagtcttatatagtgcccctcagttaaatttgcttagtttcagagctgtgggattcaataaaatgagacaggaattatgggtaacctcataaaggagtatgaaggcattgttatcgttgctacctttttgaaggaaatatgccctcactctgacttggaaattaatagtctttcatataataatttgataaatttagtaaaattcatttttggacctgcatctagatttgcttctgccacaactaatgtgaaatataaaataaatacttactatattttagctaacatactttttcattatttttattcctaagaatggtaaatactaagaattatctaaattgctgtgctgaatcatataaatgtatcccaagaaaatatttcaaaaaaagaaaacatgcacaaagatagtcattataaaggataacaaagtcagcagaaaaaaaaaagattgtcattatagtattttcaggactaaaacaattagacatgaatcaaatgataaaaagtttcaaaaagtaaatacataaatcatgatatttcagcaacaggaattattgaagtaccatgagaaataaatttttaaaatgcaacaatatggaaatattgagatgtaaaattagggaaaaatacaaggagaataaaaattgtgccttcactctgatataaatatgtaaaatatgttagtttatagacaaaagactgtaagaggatgttcaaaaatgaagccagatgttgcattatagtgttggtattaaggatgagttatttttcctttaaattctcttctgctgttatatgatatttataaaattttaaaagtgcagaaaacaaaaaaaattctgccatgaaaaactctaattatattgaaaataccatcctacagggaagaaagtgcaagattacttttaagttagctctaataaatacagtgaatgatttgcaatgaactgccacatattttaaagtctagtttatattatacggaacaatgcagagaatctcctctctgtccttcttaaacagaaaggaaaagtgctgttataaatcttacacccttaaagaagcatggcatcactatgaagataagcttcacctaatgtccagtacagtgctggacccaggtgggtacttaccaaacactgtggaaagtctgaagggatgctggtgagtgcctcccagaggtggtattttcttttccattgccccattttgttcctctataatattattttgcttttttaatttttttaagacacgagatcttggtctgtcacccaggctggtgtgaagtggcatgatcacaggtcactgcagcctcaaactcttgggttcaaggaattctcccacctcagactcctgagtagctgaaactagagtcatgcaccacaacgcccaactaattttttaatatttagtagagacaaggtctcactctgttgtccaggctgatctcaaatttctgggctcaagtgatcatcccatctgggccacccaaagcactgggattacaggcatgagccacctgcctggctaagttcttgtttcaataactgcctcctttctcctcctgcagcttttaaattgtagataaatattttcaggtgctaacctagagtcttactcttccatgttcatatggggtatctgcatgctgggggaaggaagaggttgaggagggaattggccttttgctgggggtttagtgcactggaaggcatttttagaacatctggagatttgcttccttttgtcagaatcccaaagactagacagatatttgaaccacaccgtagataactgttttgattttttctttttctctttttttcagagacatcataggtcctattctggggccccagtgaattgttccatagactttaagaaattcttgggctgttggatgggaaggcaaaaccatgtaactggatggagtgattcttaacttatttcttttcactctacagttaagctaaaattagaaactctgaaaagctggctgcttttaaaaggagataatggacacaacctttgagaagggctggtgatggaaggggaagggaggaggcggtcattttcccatacatcaataaaccatagacatgcttggttcattccaccactaggttattgctgctgggaagcaaatattatcctgtctcttgtttatggagtaggtttttttttcaaattaattaaagggtttatcatctcactaaacacacagatgtcttaataaaatgtagagctatgtttagtatcatggcatctgtttcctagatgtcatgtggagtgctcttggaatataaaaatatggtccctgccccaaggagtttgtatatgctttttggtgcacatacacaaacataagaaaatgggcaagtcaaattatagatgaggatgatagtgattttttttcacatttcatgagattattgaatataatttcataaaaatgagaataccctttcagataaaagtgtgcaaaatattttatttatgaatgtaaatttttccatccaaagccactgatcaattagttaagtaaaatagaaagcggaagaaatttttgttctgaatgatattaaaatttttctcagtttttgtcttggctctcttaaaagtaaagattataatcagatagtcaagatggtattaatgtgtttgtttctaaaaatgctttgcaggcagttatctttgaagaggatgattaatagtggtagagataacattaaagaaaaactggttctatggattgtacagatggtcttcaaggggtggccgtcctgaccacaggaactctggctgctattttaattaaacttgagggcagaagaaaagaaactgttttttgttttttttttctaagtaagtaagtattgaggttacacaatgtgtttaacctcggggtttgtcaacaattgtagaaaaactgaacagtttacaagaacaagccagtttgcagtttttcagttcagtaaccaaatgactttcctattgtaagtgaaagtgggaaacagcttttcttagcaaatgtagactttgttcttagaggagttagttattgtcttcaaacaattggtattgtaaaatgtgacttaggaacagaaaagaagtgtgtaatcttatggtaattttattgtgatgtgttacattgttttaaaatgttattttatttccttaaacttatttgtttttctttttttaaattataaaagtagtacttgctggttgaaaatattagatgattttcaattccggcatcataatttctgttgggaaagaagaactaaataatacagaagtatgtgaaacaaaaaggagtttctctcttcattccctgatccacccagtggtcatgcttgtgatcaatttgatatgtcactatatagaacattttattctaagtagaggcaaacatactgacatagaaaatcatcatatataacatgcacaagtgttcatcccagccctgtcctatttaagtgcttttatacactttagccacttcaattttactcactctgttacccatgctagagtgcagtggagcgatcctagctctatataacattgaactgctgggcacaagtgatcctcccaccttagctttccaagcagctaaggccacaggcttgtgccactacacctggctgatttttaactattttgtagagatggggtattattatgttgtccgggcttgtcttgcactcctggcctgagccaccgagcccaactttataaatatttttaatgtgaaaagtgtaactttactggaaatatatctcttaataagataaatgagaccatcttttcaaaaaattatttcatgtgtctggggtgaaaattattattactaaaatgaaataagcattaatatcaatagtatttctctttttctttttcataaatgtacatgctgaaaataatgctcacataaataaatgggtggtaatggaagtctgttttatagtcatgcctctccaatctttgaactcctaagttatatgccaaaaaacatcatcagtgctttgtcaccaaaagccattttattaatctgttgatggaagacttaagtaggcttacctttaaattcattaaatctgagaaattggaaacaacctgacttgtaggaggatttatttaccagcattggagtcttttactttctcaatttggggcaagggatcaaaggatcattctctgtatcagttactttttcacatagcagaatcatgtaaaacttagaaaggttcagaatattggtaatttcagtacacttttgctcatgtaattttttttaaggaaagcttttatctgaagtttatgggtattcaatccttggagttgtagttttaattcattcaattcaattcatgggaaatgttatttacatataatctaattggagaactcagccctcaatgtcagacaaactctgatttcatttcttagttcaagtgaacatgttaatatgtactgcaatgatcttcatttcatttctgaaattttgaattgagatagaagaggcacaaggcttggtgatgtgacactctgctgctgtcaaggtgtcttccaactcattcccatttgtcctcctgggactatccctcaggatggatgcatgcattctcaatagcagggataaagaggcaagattatttaatgaaaactgttagctctaccactgcctcactctataacctgtctgcactctgagcgtgtgtatgatgcagggaaaaccaaagcacctttatatgcttatggtgccttggatggaagaaacttattacatccctttgtttggtgccccagaggattctacttcctgagattatgccccttagcaagattctggttggatgagagacttggctttattttttaagggatgagaaggacaccagtttagggtggataagaaaggagcaggagtagccagcagtgccacagacatctcagacttatcagacttgggaaagttgaaaacctaccggaatttcattcacttaaaactctccacgcccatgtttctcttgaaaaatctttatgtatacttctatctctatttgcataacaccattttagaccatttacatggaagtgtttgttggctactatgagaaaaatgccagtgatgagcatttacaaattttactgaatttggacttttaggttctctacatataattacattcaaatgaagttgtagggatatagattggtctatataaatcttcagagaaaggagaggatgcagaatgatggatattgatgatgaagtaagataggaacatatagactgtgttgttttgagttgccgagattccttaaattttacttagttttgtgttttagagcagaagatgtattcatttcaatttctcttaacatctattgcagttcttttgtgaattatgattggaacagattgcaaaatctcccagtgtatcagttttcctaaaataaatcattaaaagcagttcattatctataaatctttcctgggttaaaataaaaatctgctttctaggtcaatcttcattaagctattaatatccttttcatattataagccttttaatttcttttattagcaactgaaagtagctgaaatatgaatgtcattgttttgaatattaattgatgtttgaattatttttagtaattatgctccgacgtcagtgaacttcattccagcccacccagggacaaggaacttctccaatatatttatatttactgaactgtatttatatttgtatatttgtattttacttcttgtgatagatgttcctagtttctatgatttttattgcagtaaaattcaagaattgtcacaagggtgattcattagtggtacattagaaaagcctgatttttgttttgctttattttcaagcaaatcaaaacttcttcagcataaatacatgagaactcaatttcctaagtctagaacagcatttgaatttttagctcatcatagtaattgttcaattttttccagaattactatctaaccattttgtatgcattttattctaaatacaattgacatcaagaaaatacggtgggtgaaaagagccctggagtaagattctgacaggagacttcctctttctgctctgtgacctttttcaagtaaacatgtctctgagtcactttgttaccatttataaaatgaaatggtttagtcatagtgattcttcttaattgttactgagatttataattttaaaagcaatataaaattagagaaaacacaagccacgtaggcatacaaaacgcaaaagatgaaacatctctacaacttcagaccttggccaaaagcattgttcactgctgatggctgaatgatatacccttgcatgagtatgccattatttatttgcctctcgaaggacatttagagcactttgaagttccagttgcactccacatgcagagactcccaaagaacattctactacatattttagaatttacatgtgaaaatgcagaatcaaagtatgtgaacatttaaattttcaccttcgttaccatgaaagctatatcaaaagttgacattgtagattttttttttctttgcaaatctgtatgaaggaaaacaaagtttcttccttcctgagttctcttcctccactcctgtctttgtgaatggccacttcattcaagcctcttcaggtacctttgagattgcacaccatgtttccttctgagtcttcacaactctattgtctcaaagcttgatggtgacaaaaagtgtgttcactaattcatccaagaattttgggggcctggtgttaccctgaaggctaaagtggtaaacaagagcattatgtttcatagttgcttttgtgaagcttaaggtctagtggatcaagaaaaaaatgtccattagataatggcaggaatgcctgtgcttttccaaaatgcgaagggtgaatacagaaggacatgattcagtctgatggtggctggcagtgaccagggtcttcagggaaaagctcactgggaagtgatcttagctccaaaggtgagtaagaactaattatccaaagtaatgggggtaggaagtgggctgggaggaagagctttgaaatcagagacatacaaaggccctgcagcaggaggtagcagagcaagttagagttgttgaagttataaggcccagtggctgagcccagaacacaaggtgaagtttggtcaaaggtaaagccagaacaggggtcagaataaagcttgctctgttgtgcattttttgttacatctgaaatgcaataagaagccaatgaagaatttaagcaaggtggaaataagggaaatggtggtggtggtggtggtgtgtgtgtgtgtgtcttcataagagtaacatgattaagtttgcattatcacaaattgtcatgaaatataaaaagaatgcttagaatttaaaaattagatcttgcttatcttgtatgacttgtaagcagattgtaagcatgtaagcagattgttcatgattcttttggaggaagttctccccagtaatgcggttactttccagcatttagcaaggaaatacaaataacgtcattttccgacagggcagagagtcctagtctaatttagtgtcacaactagcagttctgttatactttaatccttaaatattagaccaaagcagggacaatagaaaatgtgtttacaaaccctcctgattaaggtgactaaaaagcaaaagcgaaacaaaggaggttgaggtaaagagcagtcttacacgtaagcttccagctttgggactgatttacaaaccacaactgaaatgggtattatatatatgctgatgaaagtagctatgtaacatagtttggatctgtgtcgctgcacaaatctcctgttgaactgtaatccccagtattggaggtggggcctggtggaaggtgatgggatcatggaagcggatttctcatgaatggtttagcgccatcctcttagtgctgtcctcacgacagtgattgacttctcaggagatctgcctatttaaaagtgtggcgcctggctctttctcttttgctcctgctcccaccatgcgagacccctcctccccctttgccttctgccatgattgtaaccttcctgaggcctcctcagaagcagacatctgtgttatgctttctgtaccggctgcagagccaattaaacattttctttataaattaccctgtctcaggtatttcttcatagcaatgcaagaacagcccaataccctgtgtcttcattcattaaaaggctactgaactatgcctactactgcattttgcagacttgcttttcctccatttagaactaatgtcttttatttcaagacctaatgtcacctcattcttttttcatgtgataatatcctctgatgtggcctgcgagttgcccataaggaatcgtggagtttgggatgatagttttgggggtgtgtgctattttgccttcttttttcactctcaaatataaaaaggatctaagtgctactcctgaagttatttgcggggactgtttgcactttcttgcttgaggtgtggctgtggagggcaagacagacaaaagtccaaactaaatggaaaatggtgcagttattgctgaaataggtttcccaccatctaattcctttgtgtgctactggctgaaaaagtccttttccttctcagctccacagctactttttcaggacagagtctgatttacatagacaggctgaatgcagaagctgtgtgtttaccatgtgaatttgaggccactgagaagattattttgttgttctgatctcttgaccttctgaaagctcccatcagacctttctcctcccaccttccaccacactataaataaaagccaacccataagcacccactcagatgtatctgcttcttaaatttcggaatcgatttgttaatctcaaaaggccgtaaaaacctgaaaacttaagtagctaacagagaaaaaaaaaagttcaaacagattcttggaaggctttgaagctaggatgcttggggagcatctttgtagtctgttgagggattagagacggcaacatcatgtcgcctcgcaagccagaggacagctttgaattgcagccaatcagaagccatagtatgtttttggaaggtggtgggggccagttttttcccttcaaatagctgacatttcgcagcccccgtccctcttggagcacgacagccagagagtatgcaatttgtttggaattctctcacaacagtcctagtttgaggctaaggctaggttgtgaacatttagagtttttgtacgtcttgacaaatttgtgttcatcaggtgctccgtgaccatcagtattgttttggttatacagaccaagtgttctgggctcagatccaaaacttgcacaagtaaatcagcctcagaaggcagccttagagatctttgaaaagtgctgaagtagggctaaatattagacaatctgccataatttaagttttatatgtatgtatatatatttatatatatatttaattcacagcagggagcagtacacacatcgtaagagagaaatctactttatgcagagttaattggatgataccctaatttgatgatacccacatcattcagtaattcagttttgcgctttctttctttttatgcttttcatttaaaaagcctatttatatgatgttgaggagtttgttaaaattagctgatattttaggatccttttgacattttatatgattataggacatggggacatgagttcagaaaaattggaaggctctcacagttgaagaactgccatatttgggagtccttggcaaagttttatgtaaactgtatgttttttacttagggagtctttataattgaaagcacccatcatactttgtgcatggacttctattcacagaatgaatttagcaaagctattgggcaatataaaattttaggatagggaaaacatagctcaaatgctatggtcattgtggatctcagactgagtacaaggctgcaatattcactcctgaagctagaaacaaacctcaatctgaaaccatgctggaattctgtaattctcttccacaaagctaaagtagaatgtgttgtgttctgttttggtctccacagtttaaagaggacttctaaaacagaggcagagttcagagatgaatttgagtttaaaaatacgattctaagtaaagatagaaagtgggtatggttgagtagaaatagaaacctgatcgtgactcatggtgtccactcaaccaaaggtagtttcctgggaagtagaagatccttcccctcaaaaaggtcagagaaaaggccccacaaatcctcatatttaaagatatcttataagagtacacaaaaatgatatagcataagagggagaaattcagagtatttctcttgctatagatgaacataaaaatatttgacatctgcggtgcctatatagaaactcaagtacatggagctctaagtctattcattatagagcattcagaaccctgggcaaaccaaaaccaaaatagtggtgtcaacccacttctttgacatgccacaactagtggcagatacctcctattctcccccttaccagggacattctcccaaatgtgtcctcttgtgcgtggctcaccactgaggtgctttgtcactcaccttctctatatgatttcagtctgactgtgagtgggtactgtgatgaagcctttgtccacctctcctaaaccttgttttaaacccactttactgaaggtgacatttccccagttattccttattcacatctcctttgtaaaagcatctgaaaccttcacgcagaagccaaagtgtgttacagttctgagtaaagaccccattaaatatgaagattctagggctagtggatctctaaccctaggtgatctctgcaataagtgcagtgaaaccatggggtcagagcctcaggaaatggtagagttgaaggccaagatctgctgattgataacttcacagagaagaaaactcaagaagaaaccaagggactgaatgaagaagaaagaaaagagatgagatggagtaccccatctctccctgaggatggaaggagggaggacagaggaagagcagcacagaggcttccaggtggagagaaaggtgtagctgttcaataatctgatgaaagtgataggaaggaatttgtgagactgtgatatcaatgaccttggacttcttaccaaagtatgaaatgcagtgtgatttttccagtaggatgatgcatagagctgaagatcttgaggaaagttgtaaaggaatggtgctatggtttcagtatgtcctccaaagtttatgtgcattggaaatttaattcccagtgcaacaatggcttttcagaggtgattaggtcatgcatgctctgcccttatgaatgaatcaatgtcattattgcaggagtgggatagttattgcggaagtgggttcctgattaaaaggatgagtctggctcctttactctcttgttcttgctcccagtttcactcttttgcccttccaccttccatcatgggataatgcatcaagcagccccttgccagatgcaggcacttgatcttggacttcccagcctccagaactataagaaacaaaactctgtttattataaattacctagtctgtggtattttattatagcaaccacaacatggactaagacaggtgggctaactattgaactgaatttttggttcacatttattcattcatctatgcaataatattcatgctcttcattatatatccattatatgtgttaggggcatgtgcagtgaacaaggcaaatgtgttccctgttttcattggtggggaatgctcttgcaagtatggtttctaaaagggcagtgttttatcccctgggagagtgttagagatgggagtatctaaaggcgctttggctcttccctgcataatacatatgctcagagttcagataggtcatagagtgaggcagtggtagagctaacagttttcatataacaaacttgcctctttttccccaactagtaagaagcattagtacacagaaaagcgttgattctggagccagactgcctagttcaaatttcagcttccaccgcttaccagctctgtggcttcgggccagtgatttaattcctcagttacctctaatgtacactgggagtaataataatacctacttcacagagctattttgaagattaaataagttagtgtttataaaatgtcttggcacatagtaagcactctatagctattgacaaataaaaataggcccttagacaaaatctagtatgtaaaaggcaacagagagcatgaattagtcggtctcaaggaaggggcaatgctactccctagaaaatatttcagaattttgtgggcattttggttgttccatggattggggaatatggtgggaaagggccagcacattcctgcacaagtttcaaatattctagcagatatttatgcagatgcaaaaaaggcattttaaaatgatctgaactacatataattccaccttatatgtaggtgtgtcagtgttttattgagctgtgaattagaagtttcagagttttattctacactggatttccaggactgtgactgccttctaaattgagggatgatttcctttgttttgttaagaacattaccaagagttactcactatttcagaatgtcactgatacaccaatcctagcatttgaatcccaatgtaatgcacctccatcaatgtgtgacactcattgtggttctccttatttgtacaagcatctcaagacttcactgtgttttctagtgaagctgtaaccaatcactaatatattgagatgcatatgctgttagaataacttgctttccttttacatcttcatatttaaatgagagtattatattgtcttttaagaaatcgtatcagtggctagacagattgcatgatgaatacattttattttcttatacgtatttgttagtggcaatgttgggactgctgtgggtgagaacttctgctacaagcaaaggccctggggcaggtttcagttagagttatagagcctggatagttgttagaaggtgggatgctctctataagggaactactgctctccataaggaaagcatttgttaaatgggcaggaactgtaacatgagcgatttagcattgtcttagcttgccaagctctagtttgttgatgtaagatactgacagttctctttaaatctttgtaaacaaggtagaagctcatgtctttctgatagagagtagtcactacacctaaaccaacagctcggatttatgtccaaatctatttacatactcacacaattctagagttaagttcgcttgctcacacaaatgtgttatttgacccatttctcccacaaataaaagttacattattagagggatacataagaatttgaattgttatatgttaaaaacttatttcttcacattgatgcatttgatatattattatttataagtagtacatgtggcccatttaaacaacgtgagggtttcataagtgattttttctttgggttgcaaactattgacaggtggggagtcaaatttgaatatctttgtgctcttgttaactaaaacaatgcctggcatacaataagaatgcaatacatctttgataaatgaatgagcccttatttgtggggtggtggatttgggaatgtaaatggagttaaagttatacattctagattctacttcctgatctgtcacttaactgagttttgaagtttgagaaatgacttaaaatcttggtatcatcatccaaaaactgcgattggtatcacatgcccaggttatgtataacatttttaagatcaaaagagagaagacagataaaaacatttgaaatccacaaagtgctaatcaaatacaggtgtactaaattccacaaaaacaacagaatcagattagggcttattcagagagaaatgatgcattcactaggggtttagttggttgaatagtgttccctgcaaattcacatccacccagaacctcagaatgttaccttatttagaaatatattttttgaagataaaattagttaagatgaggttatattggatcagagtggacccaaaatcctatgtggcatcctgataagaagaggagatgatacatggggagtcacagagaagaaggccatataatggcggaggccgagattggggtgatacagctgcaagccagggaatgccaaggactgccaggagccacagaagctaggaagaggcaaggaaggattcttcgctggagcctagagaaggaacatggccctgctgacaacttgagcttggacttccagcttccagaactgtgagagaataaatgtctgttgttcaaagtcacccagtttgtgacagtttgttatgggggccctaggaaactaatacaagtgttcattattttttcctcttctgaagaaagggacaggatcagaggtgaaataatgcttctggaaatttgcctcgtgtcctggcatcagtacaattggccagacctttatggaaatagaagcagttagcctaaggtttaaaagtactggctttgggacacagatgagattatggtttcatcactggcaacactctgggaagttggaaatcttccacttcccacctgtaaactccaagtgatgatagccatatccagtccattagttgacttgaaggttaaatgaaatattatatgcagcttgaatatatgcatacatatatcttctcaatgttaatgattattactatagactagataacttgaggcaaccatagttcaatttcagatagctctagtttataagactgtgagccaagaacttaaaaaaagaaaggtgacggttttcattttgattcaggactcgatcacctctttgtcagagcatctgaattagcctttgtcatcatgatgatgataaccaaaactggtcaattaacttcacttggctgatttgcattctaattgcaattttttttatatatcttttaagtaactgcaacttttgggcactgtttaataaaaccaagaaattgaaagtgaggagcttgaaaaagtccttgaaccttacaatttctttacagattctatatgtttcacaataaaggcaaggttttaaatctcagttatcatgagaaggctccaggctggctctttgccagtgtgtttaattgagagatgaacacgtcagattcatctctcacacactatcactatcactgtcctctctgagctcaggctgggctcttctgtcccccatcaataaataattcttccttaggtttaaaatctcaaatagcaacctaagtgcattaacaaaatatgtattatataagaaacattcagagaagagaagttcaaggtcaaagctaaaatttacacagagtttcaatatttaaatgggtctgaaaactccatattccatagccctgtacatttacctatactcctcaaacatctctttgcataattacttatgctgaattgaagcaaaaacatcaaaatgtctggaaatttaggtttcactttccattatttttccaagaacttttagtaaatgttttcaaaacagctttaatactatatctcatcatatagaaatcatgcaatcatagaggctcatttacatgcttcttggttccatagtggttgtatgctaattacacctacatactttctgaacctgacaagacagtgtttataatttggcttcaaatgctaatatatattttaaagaaattcagatggaaaatcatctttaaaaacaccttattcacatatttaccacgatcagtgcttgttattaatttctgaagttctgagtttcacttctcttcagcctagcttcctttagcatttgccattgtacagatctgctggagaaaagttctctttattttattctgtttaaaaatgtctctacttttccttcatttctaaatgatattgttttctagatatagaattctggggtaacgtagttgtttcaatacgtttatgatatttgtcaacttattgtgcctgttgttattaatcactcaaattcatagttcatgtctaagtaatattttgtattactctagtggctttcaaaattttctctttacttttggttttcagcacttatactatgatgaatctaaacatgaatttctttgtatttattctacttggtttttgctgagtttcttcagtctgtaaattcatgtctttcaccaaatttggcaaaattttgttcatttcttcaaatatcttgtcccactctctgtcttctcttcttttgggactccaattacatgccgttagacttttttatgttgccctattttacattatttttaataattttgttcaatatttgtcttcaatattgtaatcagatgcaaataaactggctttctcaaccttaattacatcagccttctctgtgaaataaattcaatcctttattacacagtttttttttacaacagctattcaacaaatgtgtatgtcatcctttctgtaaatgtgtcatggtaatagtatttgattagctaaattatcatttcactcatgagtgattacctatgtccataggtctactgcctgtcctaaattgaacagttttgtccacttaaaacaagcaaacttccactgataggtaaatgttccaactttactgtagcttgcagcagtgcctctgttaagtggaattctatttctgccacagcatcaataagctttcctgtgtatgtcccatataaggacctggttgcatttctattatggaagccatagttgccctgctaaggagtcttgccctttcagggaatttgtgcttcagataaactgccaaaacccaggccttctttgaacatttatattgtctcacagctctatttagaacagtctgtaagatcactctgtcctgagtaagacttgaagactcatttttaccatcacattggataataccctgcaagccagccctttggaggaatcaaaattgaacaatcaagcctgaggacttgatagagtctcaactttgactttttagttttttttctctctctcaatctttttctttcttagaaaatagaaaaatgactgcttactactgattgtaatgtgtctcaacttttgaaattcagccttaaacttgttttactgtgcacatttgcttttgttgaattaagtccaggtctcttcatttcccagggcaaaaaatcttggttaaattccatgggaaaggattgtgttttgggtatgtaaacatctatccaaatacttgtagaattcaaaaagagcatacattcttaagagtgactcagttcaaacacatgcgtgcagattaaacgtcttctttaaggaagcatatagttaatagttttaaaaatgaatttccccaacctgattcaaagaactctcattcttccagaataaaatatatcttaacttcaagtgggataattggcctcacccctacagtgcttgcttggcgtctagcaattatgcactagaaagcacaaaagggatagaattaataggtaaattttagtgagatttggcatgtgtgaggttaagggaatttttcaaagttgcttataaagttgcatacagtttcaaattgttttcattttgagttattttggttaaaaacagaaaccacattttaaacaagcagtctgcttaatgtaaaataaacatgtaacttaatttgcacatttgttgggtgcttgttttggaaatcattgtggtaaaatggaaataatcacagaggcttctgagccaggtagatgtggatttgagtcctggcttactaattctgtggcatcgggtaagtttctgagctcttcttagccaccatttctttttctataaattaaaaatgatcgtatctatctttaagggtggattagagggttaacagttcagcacccacagggtttttaataagtactttgaattttgagaatagacaagacctaaacattaaagtattttgcttttgactaataacgtctagattattagtctaataacttcaggctgttcatagtgatcttgctgggttgaggcaattgagactacattttgaaatcttttgttttgtgaagtatacaccacacataaaatgcataaaccataaatgttaatgaatttaatagtaatagacacctatgtaatcatcacgcagcatatcagctttaaaaaaaatttttaaagaactttttgatggtattatagcaaagatacagaaaagtgaacaaatcataaagtttataattcaaaataattttcacaaactgaacaacctcataaccattgcctgatcaagaaataagacatttctggcaccatccccccgcccaccacgccacccctagaatctccgtgtgttctttctattcactatccatcctcaccaaggtagaatattctgacttcctctcattagatgagtttcgtctggttttgaacttcatatacacggaatcacagtgtgtactcatttatatcatggcttcttcagctcattatgcttgtggtattcattttttaaccactcattatggaaaatttcaaatgtacacaaaatatgagaaagtatagtgaaccctaatgtgtccatcacttctttaaaaccatccttaactcataaatactttgatctaaacaccgtcttaattctctgctgtccccaaggcaatggattattttccccaaacatcctatcatttcatccatgaatattttagtaagtatctcagcaagaaaaggattctttttgtcacatctacgaacttaacagtaattacatgttttcaatatcctatcttggatcagcatttctccattgtgtcataagggtttttttgttttgttttgtttcttctgttttgtttttttctgcagttggattttttacaatagggtctgaatgaagtgtgaagataccttattttaaatgcctaattgtaaattgggggagagtcccatttatataaactgagtctttgagttctttatggctcatgtgaagaaacaaacatcttgcatattttccaattaaatatgttgaggcttatagtattttagaatattagaattcgagataatcttatagtttcttgatatcttgtgtcttggcatacttggaatcccctctgtgttttgaaagtgaacttttagcttcaccgactttttcacctttggtattatagagtctactttctgctatttttgctctcttgatttacctgccaagtggcaggcacaatgggcaattttagctcagctcatctgaagaaattcatcactgagacctacaaaaattccttgaaaggaacagagaaagccaaggttgttctcactttcagttctcacttttgccagttggatgggacagtgactttaaggatataacaatacagctgacacgattaggtgtttgtttaaatgatttttcatttcaagtttatctttgtttaagctgaccacagcaaatatttgatgttaccagttaaatatcttgcagtcttttcacgtttaaaactttttcagccttaagtttctgccttcttatttgtaacctgtacaagggttttcctctctgtctcttccatcacgggatggtgtctaggcacatggtaagggccatcttgttcttgcagttgtcactggttggttgagggctcttatattgtttaatgtcaagccaggtcttctgtggttattgaaaattaagtgtcttttgcaggtcattctcacacccctgttgatgatcttcactgttgcttcgagccataagcttacctttcactgtgaactctggccccaaccccagacctacttctgtccactaatcctacagcttcccttggtacttgtgcactccctgctgctttctctccactagctgtagtgtgttggaccctgtgaggtcacctttgcctggtcacctccctcacgtttgccatttgactgtgcccaggtcatactgagcacactgccaggaggaaggttgagcttggaggacatgaatgaggagaagctgggggcctatagcaatgattttagaatcattgattcaaagttggatgctttcctcatatcttctgcatttccctgaagaagtttccaggacctctctatctcctttatattataacctcctacttccttctccatggcttgtttcagtcttccagaattgacgcaatgacttcctttaaattaacaggtaatgtgaaatagtctagttgccaaattaaagagaaatgaaaaggagcaagtaaaactaatttttttttttttttgagacgaaatctcactctgtctccctggctggagtgcagtggcgcaatctcggctcactgcaacctccaccctctgagttccagtgattctcctgcatcagcctcccgagtagctgagattacaggcacctgccactgcgtctggctaattttttgtatttttagtagagacagaggttcaccatcttggccaggctggtcttgaactcctgacctcatgatccaccctccttggcctcccaaagtgctgggattacaggcatgagccaccgcgcccggccaagtaaaaccaatttttaaaatatttttatttagcctaaaacatctgaaatgttatcatttcaacatgtaatcaatataaaaatttattgagatattttacattctccttgtcttctttttttgggaaggaatgggtacagagtctggatcccagagtgtgtatttttccctcacaatacaccttagtttggaccagccacattgcaggactagaggctaccatattggacagaatgagtctaggtcatgaatgaggaagcttctagataattttaagagaaaagcaaaaacaataaataaactcttaggatggtgcggctttgcctgtctacattagcatttcattaactccaggtgcttgtttcccactgccacttggtatgtaaaatttgtcttccactcaaccaggcagatttttgatcacagaaattaagcctctggtttcctctcaatccacccaaacacatagcatactgctgacctcacagcaggtactccagccaaccaatccctgaattaaaaactgattacaggcagctgctcgatgccttgccacttcccctctcagtgagtccattttatttgtctgacagcaaagctccaattctgtcttcacccctaccaacccacacttttacaaattgctttttagcttaatgttgaaacagccacgctttaaaaatatcatttcattatgtacaggttggcaatcaagaaagaaaaattcccataggactcaaatgaaacaaatctaaaaatttaggactgaagctcgggaatggtcaatctgattttaatgctctcaagagtccacataaaatatatgggcttagcaaactttctgggaaaacccactcaaagagatgacttattgatgcatggatgaagcaagagtgactcccagattttatccaaaaatatatctaatgatatatgaaaatgatcattctagttaaatatattctaatgatttgaacatatctaaataagttggttctatccctcataaaatctaatgacaaacttcggagacttaaaaagtgtgaaaaataaaagtcgaattctggagggtaaggcaggagaattgcttgaacctgggtgggggaggttgtagtgagctgagattgtgccattgcactccagccctggcgacagaagtgagactctgtctcaaaataaataaataaataagataagataaaataaaataataaaataaagatgaataacaatcggcccatacaatttttaccccagcaagaggatgtttggttaaatggccagcactgattattcatacaagtacccacctccccactatctcatacacccactcagtcaccaacctttatagagcacatctttttaattcccctcaaagctgcactttcctctctgttccttgccatccacctatccttctggattgctggaatggcctcctgacaagtctccttgccttctctgtgcatccccacccccgcatttgtcctccaggtcagtgtttcaaactctggtttctgttttgtttcgtttctgagactgggtccttcacccaggctggagtgcagtggcatgatcatgatcacagctcactgcagccttgacctccctggcttaagtgattctctcacctcagcctcccacagaatactggaattacagatgtgcaccaccacgccccactaatttttttttgtatttatttatttatctatttgtagagacaaggttcatgttgctcaggctgaactctccacttgtttttcagtttttaattttttaattggcatataataattgtacatatttatgaggtacatagtgagttttgatacatgtctagtgatcaaatcagggtaattagcatatctatcacctcagaagctcacaatttgttttgttgggaacattcaaaatcctgtcttatatatatttgaaaatatatacaatttttgactgcagtcatcctacattgctgtcgaacactagaactcattcctttcatctagctgtaattttgtgtcctttaacaaatccccccatgcaccctccccgctactcttctcaccctctagtagccactgttctattctacttctaagagatcaatgtttgtagcttccgtatgtgaatgagcacaagcagtatttatctttctattcctggagaagagcaggctttttcctgaatacattgctgtccaatattactataaaacataatacacatgaattattagaacaattaaatgagaaaaacccaggcatgcaaaatattaaaaaatatttaaaacattattttaaaaatttaaataattattaatttaaatagactaaaattgctctctcaacttgctctgtaagttcccatatttactctcagtttctgtacttatcttcctgtgagattttaaaacagcttggttcataattcaggtagcactgatatagatccacagtccaatactatagccagtactcacatgcagatgtttaaagttaaatttcaattagtttaacttaaattcattaaaaattcaattcctccattgcattagccacatttcaggtattcagtagccatgtatggctagtgataactatattggacatcacagatatggaacatttccatcatcgcagaaagttttattgaacagtactgctgtagacccttgctacttacagagtggtccatgagccagcagttcttacttcacatgagagcttgctagaaatgaagaatctgagctgggtgcagtggttcatacctgtaatcccagtactttgggaggccaaggcgggggtgggtcgcttgagcccaggagtttgagaccagcctgggcaacatggtgagagcccatctcataaaataaaataaaataaaataaaataaaaataaaataaaaaaaataatttagccagatatggggacacacacttgtagtcccagctacctgggaggctgaggtgggagtatcacttgagcccaggaattcaagcctgcagtgagccatgatcacatcaccacacttcagcctcggcaacagagttgcgacttggcagcaaaaaaaaaaaaaaaaaaaaaaaaaaaagaaatctgaaaaacagaaaacaaagtaggcctaaacctcttgaaacagaatgtgcaattcaataagtttcttaggtgactcctatgtactttaaaagtagaagccctactctgggatgtttctaggacaatctaaagtccaaatctgatcagactatcctactaatccttttaaattgatacataatatgtgtacatatttgggatacatgtggttatgggatacacctgatcttttggtacatgcttagaatgtgtaataatcaaatcagggtatttaggatagccataaccttcaacatttatcattttttgtgtgtgtgttggaaacatttcaaatctctcctagctattttgaaataaacaatatatacaatgtatcattgttaggtatagtcatcctactgtgctgtccaacattagaatttattccttttatctaactgtatatttgtacccaccactaatctttccatagcttgcaagaccagctctatctaaagtggtaggtattagccacatgtgtttatttcaatttcagctaattaaacttaatttacattaagtttaatgtcaattaaacttaaagtttaaaaatcatttaaagttcaaaaattattttcccagcccgccagtcacatttcaagtactcatttgtcgcatgtggctggtagctactgagttggacagtgtagatacagaacattttcttaactgcaagaagtttgattgcacattgctgatttagactctagtttaacatccagagatctcatcatctagcagaactaccccctgcctacctctcaagcccccaaaccatggtgcaccaggttggcccttgtctctaacacaatgagttacgtaatttagttcctatgcaccatcaccctcattgttcctttaccttgaccactatttttccattcccttctttccattcacctctccataatcttcaactaatctctgtgtcaaaatttacctcatggtcagctgctccagaaagcttttctagaaaccatcccatgctgcaaccctgccacaatttagattgtcccctttcatttcttaggtagaagcctatgtatgcatgtatcacatgcttttgctgttgatttattctctccatttagatcagcatttctcagcctcagcactattgacatttggggccagataagataactctttcttgggaaagtagacagctgtcttgtgagctgtaaaatgtttagtctcattcctaacctctactcactggatgtcagtaacctccccagttgtgaccatcagaaatatatctgcacattgtcaaatgttccctggggagcaaaatcaccaatgcataagaaccactaccttagacctatctgttttctaaggagagcctcttgaggtctgtgagacacttcaaaccacagcatggtacataggtcctgcacacaattggcactatgttggtatacatgctgaatgaatgattgattaggaaatctgttgtcagcaggtgtttcttctttccttgcatcctttgtttcttctttcttttattctgcttctttgcacgcattcccaagtctaagcaacacattcccaagtctaattctatttcatgagtgaacccattgaccaaacaggagagccctgtgcagggcagtcattgatcataggtgtctcccgtggccagttggtttggttggctgatccacagtagagggatagacaaaattatcaacctcttaaaatgaagactgggactgggaatgaatcagatgtaacagcctccctgtgatgctcagttttattagctattttatatatactgtatatatgtatgtaaaatagctctatcttatgtaactattttatatagcttttagctatgggtcagagtcgccaatctatcatcttttcagccagctgtcaacacatggtttcagaatttggaagaaacctaaaagattatgcattccagcagggcttggtggtgtgcgtctgtagtccctgctattcaggaggccagggtaggaaaattgcttgagcccaggagttcaaggctgtagtgcaccatcatggtgcccgtgaaaagctacagcactccagcctgtccaacatagcaagagcgcatctctttaaaaaagagagagagagagagagagagagaaaagatcatgctttcagattcctcatttttttctacatctggacactttccttaggtcctactccagccatcattagcatcttaagataaagatagaattttgaagttccatcatttataaccaatcaaatgcaaaattataagacagtgatattcttgatttgaaagctgtaaactctgatgtctgctgctctgctcttcactagtaagttccctggcactagagcaatgttataggatggtgacctagtttagctctaccgtatttctcgagccaagtagagaagaactggaagttctctgccatccaggcctgcaacagctttggagtctctcatttgctttgctcttcttctatctggaatcctttcagaagcctgatcccccacttcgtgcattctgaaagtctgggccttatagtatttgtgcttcttgctgggcaccatttctgcccagtgttacctgatatgtctttacacacctagctctaattgtcctaatattggcattctcttgttttggactggaggaaagatggttaagtcctctctcctttcttggtttagcacttcttgcaatgtttttctagatttgacctacctttaatctctgcaggcatggtccaatacccttctagcagctggcgctggcattgcaatgtgaatctgccactatgctatgggctgggctctaagtggaaatatgtatacattttttcactgcaaagaatcagctccctctctcactccaggagatggttgcctcagccctgtcacactcttggtcctaggcagctttcagcttcctctgtaactcaaccatatggccagttagatggattgagagcatgaccaccaaatcacctgggatcctacttatcacaaaaccgtgaagctttgttacagtcatttattcaatcccatcaaatatttatcaaatacctgctctgggatagctccagtggatacagtaagatgtcatattcatcaattgctggtcatctaatgggaataataatgaagcaaaaacatgattattgtacagtgagaaatggatatacaaagggatatggaacacagataagggggaaatcagagaaagacaataagaatgaatcctttttagtaacagtgtactgtgtgccaggcaaggtgcttgtaatttctatatagtttacatttctatttaaagtctcataaccacttggtgaggcagacaggcattcgaaaatagcggaaaccctctttagaaattgataacttggttaagttgattatttttttctttcctttaccttttcttgaaatataaaatgcagttaaaaaggtacactcttctaaatagtatagctcagtgagtttttacaagatgagcacatccctgtaaccagcagtctgataaccacattaagaaacaggacatttcctgcatcccagaggtcctcacatccccctaactgcaccctcctcccaccaccctgctcccttcctgaattctgctgcctctctacccaaggctaatcttctggctttaacagcatagataagctgtgcctgttttattcttacgtcaatgaaacaaactcatctactctttttgtgtgtccacattttttcactcaacgtggtgtttgtaaaattcatcccacattgttgcatgcgattgtaatcctcattgctgtataatattccattgtgtggatgttccatttattcattctactgttatgggcagttggatagtttcatttttggatcatagttcatagcattgctatgggtattctagtgttcatattttcttgcacacatgtaaaaatttctgcttggtgtgtgtcttagagtgaaactgctgagttataggcatttgtgggattgaaggtggaatgggaaagagacgtatgcaatcagctcacgagctggtgacactgctggtaaaagggagtgcctatacctagctttaatagatattgccaaatggttttccaaaatggtttaaaagtgttgagttttgaggagcatgcaggagttaaccagaaggttaaagtaataataataataacaacaacaataataaaagggagcagggtggagttacagaaatagtgttacagaaatatgcagtgtatgattgtcaaatttggttgttactggttagctgggtgcatgaatttgcaatcctgtcatgtgttcattttgcttattcttccctgaaatttccagccactaatggaatgtaacactttaccctttttgaacttcttccttctcaatgcagtaccacattaaaggtcaactgtgaaatttccacgtcctattaaatactattcctagagctggatataatatttcagaatgctacccctgttccaagacatacgcatactttagtgaacatgaaattctgtgtttgaatatccagatttctttttttgcctctattgtctttgctttgactttgtggatttggcaatggttgataaattgttttagagtagaagatcactagattagaaacagtatttaactaaaaatagacctcttggctgattatcagtgtctcaagagacagtgtgagtgaatttctgtttctttttgccatgatgctaactgtcacccggaatataatgcttactggcttaaccccttttgttttttatattatgtttagaatgtgtatgtctccttgtaagaatccaatttgaggggttcagaaacacatagtgaatatgcctgatgagtagtgatttttcaataatgatttttacatgttatgtctcctcaaagataacaacagagcaccatgttgcctaaattcatgtaacttccttctgggttaaactgtttattggacatttctgaatatatgcaccatatgtggctatctttcaaagtatgtgtctgagatattattcagagccttttccagccatttagagatatatgtggagcttagagagaataaaaatataatgtgcattatttactagtaattcacataaaatattccatttctaaagcatgttgcagaattattctactggtaaattaagattgaagttgtccttagataatagctagcagtataataaaaataccacataatagaaattgattctgaaatgtaagaatgttttattattggaaaatatatccatataattattacttctacagataaaaagaggaaagccacatgatcatactgataaggcaacaaaaagatgtgacaaaattctaataattttaaaaatctcttacaaattagaaatagtaagatgctatcacaaaccaacaacatcatacatgatagtaacattcttgagcatgtctctaaattgggagagagccaaagttattcgtgcacgtccctattattgaacactgcttaataaaatgaattaagcactataaatattagaattgtcattttataacttgcgtatgagatgactgtctaccctgaaaaaacaagatcaactaaaatgttaatcccaaggaagagttcaacacggaaattatttctaaaatacttttataaaatgagaaagttttttatgtccagtaatcaaaagttagtgaagctgacattcaaaacctcaagctcaaatataaaggacctatatttaaaaaaaatcttaaggcgtgtataggattcttgtattaaattgaaactctcaaggcaatccaaagtagttttaaataagtagaagcactatatttctggaaggaataatattttaaagatacatgttctttccaaattaaattactacaaattcagttaaagttaggaaggtgtttttcaaacttggaaaatgactcaagttaatttgaaattttttgaagaaactactaaaaaatgctgagggaattatgccaaccaaaatttcaaatatagtgtaagacaactaatatagcactctattgatatggaaatcaattcatcagtaaaacagaatagaaagttcataaatacactaattactataaaaaataacacaggcacagtgactcacacttgtaatcccagtaatttaggaggctgaggcaagaggatggcttgaggccgggagtttgaaatcagcccagataacatagtgagacccctgtctttacaaaaaattcaaaaaattagctatgggtagtggtgcctgcctgcagttctagctgctcgagaggctaaggcgggaggatcgcttgagcccaggagtttgaggttgcagtaaactataatctcacaactgcactccagcttgggtaacagaacaagaccccatctcaaaatattaattaattaattaatataaaataaaggtactaaatcaattgggtaacacaggattattcaatgagaggcagaaactacaaaaggagagtaaagacaaacttgatagcaccattatttaaaaatacttctacacaaaacaattcacaaatgccaagtccgaaccaaacaaactggaatatttttgcaaaatagatgacattttagaaactttaaatccttattctgtactagcctttataaattaaagaataatagaaatatgggtaaacgatatgaatgggaaagtaaagtcccccaaagaaagaaagaaatgcaaacacaaatagatatgagaaagttattaatttcagcaataatcaaagaaatacatactataacaataattattttcacccataaaatttcccttattttcaaaactaaaagttccagtggttgacagtggggaggttaaataccactccaaggtattttgcagataatttacattggttcagcttttctggtagcctttggcatatttatcacaagcatgaaagtcctcaagccctttaattcaaaaattttatttttaatgtattattctaaggaaattataatgaaagtaggcagacattgcaaggaaattgcttgtagtactgatcaatagtataacaaattgaaacataaactgtaagtattcagccaaaggaataaattaaataatcataatatatgtcaatagtggaatcgtaggcagacattaagaaagctgttaccaaattaaataatatataaatatgttcatgctctagtgtcaagggaaatatgcagattacaaaggaaaatgaacaataagatcttattttttaaaaagaaaaaatgcccagaagtcatatggacatgcacgaaagtaacagtggttttctctgtcttgtgtgattataaatgattttaatttacttacttgtacttgcctcacatttgcaagtgtttttctacagcaagcatatattacttttataacatcatgataaaaatcatatttcattgtattttacaatggacattttgttttctaaaatcagaaagcagaaatgaaataattataactatatcttaattcagagtttaaaggagaaatctccatttactggtttccccattactacttaattggctaatctagtttttcatttaccctgatgtagacacaaatagaatctgcaatataatcaggcaccaaccatgggattaattagctaactaattacgtaaatgggatcccagttttaacagtcatacctctgcaaaaattgtctttttctttgcaaaaacaatgaagtgtcaacttttaaaaaattaatcctgccaacttcttataaaaagattgtgtaatgtcttggggaaagatttaagatatacaagttaaagatggcctttgaaagacagacagatttgaatttaatatttgactcttttctaagaatttaaaattattctcaaagacgaaaatgaatggtctgaaactcaacgaaatcttttccatgtgagttatgcactcatggtgtccctgtaggagttagagaggtgaataaattgaacgagtaatgatttgtactcttaaacttcctggaaggagaagtggcttggagggtgttggtgggaatagccaaggtatgactgtgatttcaggtaagataatttgaggagctgacaatttacctgcgtggaagtatccagcaggcatttgggaatatgtaattggctcctgaatcagacatgtcagtgaggtgatactcatataggagtcagttacctaaaagtgacagctaaaccttatgaaggcaatgaattccaggttagtgcagagcctctgcacagttccaaacccaggggatgctcttctcattctcttatctgaagttaagctccagggcttatcattcacataaactacattatgaacaatgctgtttccatctctctatcatgccagatgtcatatactagatgaggtctctcagaagagctagacagaagtataaggactcacctttatatatacaaagtgaggaacaagacaatatgtacaaggactcatattaacatatgcaggatgaaaggggaaaaagaggtcagttaattggttttaaaaaaaagatgaaataagacaggctcaaggaaaacggaaagggggcaaaattgcgggaagtgtttggcctgtggtttcaaatgttatagacagacctgaggcaatgataactgagacaagccactgggcctaaaagtatatagaaatgggtaatcttagggatggtggagtccattgagtaaatgggtggctggggggaagacatcagaccccgagaagcagaagctaaggcctggggaggaatggaagactatggacttaagagtgtagcatcattggtcgaaagacttttatttatatttagggagactagagcatgtctttaggtagagcaaaaggaagcaggagagaggggaacactgaaatacaggaaaaagaggggatagttgagtaaacagaaagaaccctaagtgaaagcaggaggagattggagcagtataccaggaccgggatgagccctggaaaagagaaggagcacctatttctcagagctaggatgagactgaggtggacagggaactaacgccttccagaacagaaatatgtggtccgatgagtattgaatgcaacttaaaatctagttggaatgtgatggataagaagagacccaaagtcatcaacaagccttctcatgaactttcagtcattaaccttcctatatagtaaggacagaaatgatgatttaagccatcttaggcaaggcagtgctaacaatatgcttttgtaaagtcaccatccggtgtaaggaataggcaccagcttagtgatgtttgcaaataagccagtggtgggtgtggataaattagagagagtaccaaatgcagtttgaaaagtgttaagttttgtctctagtaaattgcatgtagttttaccaaatagtgcttcagtgttctctttgtgtttcctctttctggtacttaaaaaaaaaaaaaagtaaagtcagttcatgtagctgtgagataaatcttgagaaaaagagtattgaatagggtactgagtttattggttaacacttaggaaagatacgatgcttgataggagatcctttttattaaacacaaagaatagcattttattctatgccttagaattttgtgatagaattggcaacaattcagttcacaaagagccttagcactgtggccactaatgcactgtaaaatgggtttttgttgatgttgatttggaggctgtgttaaatatcttgcccacagctctaaggttttgggtacaaatctataaaactatttcacatttatgctacttccttttaagacgataggtaattcccaatgatttgcttataaatcagttatggtttacaaagcagaccaagagacattcagatttctgaaaacaaattatccatagttttctattaaacatagaactgggaaaagacttagtgattacttagactatgcctctgatttttaaaacgaattgtaattacaaccataatctatgattttttttcatgaaaaaaaacaaaagctgtgtgaatgaggtcagtaacttcctcaacacctctcagtctcccaaacaacaacacaggttaaccgttatcagtttgctgtgaaaccttccaaaattttcatgatattgacacacacacacacacacacacacacgcacacacacacacatttgcttaatatgcagtatttaatgtatgttcaatacatagcatttttttgcattttgctttttatacttagtgatgtatcttagagatttttgcatatcagtatgcctagagctacttcactatttttatttgatgcacaatatttcatcacatggatgcgccatcatttttttcactttctccttaaatggatatttggcttgttttaattttttttctgttaccaatgatgctggaatgcacacacctccttgtgcataagtattggccttctttgggatacatagggaagcgtaaatgcattttacattttaagtggcattgccaacttatccttcaagatgatagtatagcagccttttaattttagaaattaagaaggttaagaaggtaaggcacagagattttatagcttgccagatagcataacaatttaggaactagaaatcaaatatcctatttcctttatagatttctagtgtctacatcaaattttttccaaatttataaaagaagaaaataatgtatattaaactagccccatgaaattttgcttcatacttttcctattctttaccagcaaagcaaaaccagttctgattggtcatttaaatcaatgagttgaatacaaacagaagtataattgccaaattatgggttttgggaaactatggtgaacacgagattctttacttgtctgttttaggttatttttccaggttatgtgatcctgtgatcacatatctgccaacattttcatgttttgggtatttcctaatgtaattgaatttctcctggtttagaaatttatcaacagaatcatctttatttcttcccttgatgtattcccaaatgtaagaaaaatatgcatagtgagttgataaaaagaatgcaagtaatctacttgaaaaattaagcctctactttccaggaaagataattttaatggggtttgggttcattctctatgagtccttctctatcctaatgtcatgttgggtcacaattgtctgatgatcctggctaagcatttggttaacctcattttgggtcctctttctctcttcacatggaggagcacagcacttgaacgctctcgtgtttgaggacaactgggctgacatcgagtgaatttttggaaaactattatgtctttgtagtcacttaatgtcagcttgatgttgaagcaaagttctgtaggagtaaaaaaaatacaagaagtgcaatgaaatattaattaggcaccgagtagaggcaaggagctgggctaggcatttttatgtatgttatctaatctatgctcacaagacttacaacccatgttgtaagtcttgttttgtttgatttccgtatcaggaaatggaggctgagaaagagaataacacatcaactagtatacacagaggttctctagctttccctacttctttctaccacccttcctcccacctcagtagaaatcagtgaacactggagcaaagaagtcctcttggaagaagcagagttggagctaagtcccaaaaggtggctgagatttagatgattgaaggaggagggttccacatttaaagagggagagtagtctgtgtaaaggcacagatgaagacaggcatggtacacacatgctttcactgggttaatgtacaagaacagagctctgttcaactggctttgggaagtataattttggaggataaagggcattggcaagaaactcattggggtctcatgataaacagccagatattaggagtcaggagctagaaggactccctgtgtctctccagagaacttagtgtctcttctttctcccttgaccttcctgctacatgtttctgttgttgttgtttttattttttttctctctgcagaatggcttatttgctctacccagcgtgtggtcacatcagctgcagcaaagattccagctactagcatcactaggcctcagtgccagattccacgggccagatgtctatccctggtccactcagctatgatgaggataatgctttcagattcttgtttacctcagcctgggagcaggttcttttatatcatggcacaagcagctcctctaagaaggcaatgattagtatttgaaccacaaggaacaggagaagtgaggggtcaatgtggtcagacttactaaggagtacttaaaggccactgcaaaaccaggcacctgatcctctaattgagaggggaagtttgcaagggaaaggtgtttgatatatggcaagttgaaagggtggagaggctgagcgccagaggtgagctgaaaggtaatggtaacaatagaggcctagggatacattagtcgacttagagagaaaagagaggaatggcaattgctgaggatgcaagaagttaccttgaaagaaggaaaagcaggatttattgactggttataaaggcagcttttagctccagggatagggacaaggttgtgtggctttgggacataaagaaaggagaaggaggaggaacctgaatgtcaggagagacataatgcttctggtttggaaatgtcatctctggttcaattgtgctatgggaataatggccataaggctacaaatggggtgtgcagagtgaattggataagatatgaagctatgttaattggaagttaatgagatgagaagtggggaattttggagaaaaacaggaagtcagtggccagtagcctcaaatctaaatttgcatcgttacgggcatgctatctgtgggtttgtgataggatttcactcagcttccaggtggctaggtcatattatcaggtggtgaaacagttaaaaaatatcacgacctaagataaagttttggtgtttgctggagcacagtaataacagatgagttctgttcggtagggaaaactctagaagcaagcccagcacttctgtggataagactgattctggaacctactttaaagcttgtgctaggcaaatggccgatgattcccaatgcttgccttagactacaaatgcaaagaggaaaaggttaattttctaacacaaatctaaatatttccttcttgtactaataggacctagccattctgtaatgcaggcaacataggtctgaaagaatggttgtattttggccaaaccatgaacttctttttgagaccctgccagttcctggtggaagccaggaaatatatttttaggcgtctataactccggctaagggagctatgtacctcctaatggttgtcatccaatggatataaatagaacctttaaagagacaagccatatgctttgtggtgcttactttatttaactccagatctgatttacaagcactttaattcctaaaaaccactctattttgttcattaagaatatgcaatgcacataggaatgctttgtaacttggctatggaatcagagatcaagaatattttcctccccaaaacttgtgataaggtcaaatgctaaaggcctatagtaattgtttttagctgttctcttagaattgaaaacaaatgttttctaataccaccaaagtggtgtgctgttagtaatgaatctgtatggcataatttcagtttcctcataatttttatgcatgacctcaaaattaaatgtggttctctaattttttaataattgaaagaataggtttttactaattaagatcagatttatactcttttgtatcagagaatgtcatggtgaaaattaatataacaaagtcatactgacatttactttagatcagtgtaaagatatactacatgtccactggaatggcaaaaattgaatgactggcagtaccacatttggcaaagatatagataacgagaactctagtgcattgctggtagcagtgtaaattggctactaccactttggaaaactatttattaatgtttgtctgtgccctacatatatctactgtatcagtctaagataaatgatcatatgtgtccactagaagatggttacaagaataatcatacagtcgtatttgtaatagccccaaactgtgaacaataaattatttatcaacaattggatagataaacaaattgtagtatattcacaaaatagaatactgttcagcaataaaaagaatgaactattaatccatgctacaatatggataaaatttcagaaatgtcatgttaagtggaagaaataggacacaaaagagaaatatgattccttgtatatgaaattcaagaaaggcaaaactaattgaagctggtagacatcagaagagtaacccactctcttcctggggagggtttttccaggaaaggggtgcctgataattttggagatggagatgtctaagtggtgctttcatgagtgtgtacatatgcaaacactcatcccactgtgcacgaaggttagatacttccccatgtatatgctataccgcagtaaaagtatgaaatatatgttttatacctcaaaatgtttcacaacacattattttctcctttccaattccacagagaagagagaggctaagtctagtacaaaaggttggttctgggccaaactggagaggagatgatgcaatggaagtatccaggcaaatacaaagggattttaacttgtctgtgtttattgcaaaaaaggaaatttgttatattgtgaaaatagtaaaatagtgtggcttaggagaggttctattttggagggggggatgtatgacaagtaatatttttatattttatatcatatccaattagatacattgaagaagaaaaaatgtgttttaattttaagcagagtttttacttttaaaatgtttatatgtatataaatatatacccactcttgtaaatagagccttatgcatgcttgtggagcattttggtgcagtcttttttgaaaatgttttccctgtttcttctacctcttttactttacctctctattgtcacaacctatgtgtgtcctacttaatatgtaagctcatataataaggcatacttatcacataaatatgtgtgtatgggtgtatatgtgtacacccacacatactaacattcatagataagtacagctttatttgtctttgtgctataaaaatgatattatagtatgcaaacttccctgcattttgcttttattcacccagtaaaacttcatggaaattcctgtaagtcaacttgtatattatggtggcccagtagtccctgctgtagatatagcataatttacttaagcagttctttgtttataggttttggttgggcaaggtcttttgtgtactacagtgagaaagctttggcctcagaaacagcaatcagagtttgtcacttagatggtctgagcccatgtctcctcatccatcaaagggagataaatttatacttggccactcacaatacagagcaattataagaatcaaaaagactatatgtaagagtgtatgcgtttggtatgatggaaagagcattgccattgttaacaatcaaatttgtttgtgtttagtacttgctgtaggtgaggcactgttctaaggtcttttcatgtatttatttaatatttacaataacgaaatgtggtactgtgtagtattattcttttaactctttccaaatgagggaattaagaaaaaattgaaataattttcacaaaatcagcaggagacctcagattcaaatcctggattttccatttgagtgtctgtgatttttatctaccatgcaatattacttctcaaatatgatgttcaccgtaccttttattttgtacatgagcattcattggtaacatgaaatagggtggtttataggagaatgatctcattacattgccaatcataaaaaatactaaaatttaaaacacaaaagacatgcatcagatagctatttttgtgcaaaagccatcccaaaatgtagtgatttgaaattacaactacatatttaggctctgattatgtgatcatctggtaagggcttagcagcagggttcttctgttgcatctgggctcattcaagcatctatgataagctgctgagtcagctaggttgctttgctctgaagattgacttcagctatgaaaataggggcaattgagccataaagcgcttatcctccagcaggccttttcaggcttatgcacatgtaggggtatggtttcaagagagaatgtagaaacatgcaagaattcttgaggcctgttgttagaactgacacagcatggtttccaccacattttctgttaaagcaagtcacaaagtgatctcaggttcaaccacctgatgggaattactaccaggacacatagcagaaggcaaagaaagaggttgaggaataattgcagctatttcattcagtgtaggaagcaaagcaaaataaattttcttactaccttatttaattcatcccatagagcctggacactgattttttattattactatgtaagtatgtgtgtgcatatgtgtttctgctgagaataccttgtacatagtttttatcttttaatttgcaaatggctggttttcttttctcggggaatttttttctgagatgaggatttgcttcctctgaatgactaagctgaactgaatctttccactctttagagctaccctcatgctcttgaagtccttatgtctgcaatgattttaatctctatttctcaggtagccagaagacaggatattatactgtggttttccacagcagcaggtctgtttggctagataatcaaggtatcaaaactaattctttaatacagatggcttacaatacttgtgaattgcattttccaaggagcactgtcatattctcaatattaccacacttcctacacctttagcatcctctctcaatactatcagttcccaaaacctttgccctattgtgccaagaaaagacatttatcagatgagtaaactgaggcataggaaatatctatcagtttcataaagggttcatcacctgagatgcatgggtttcttatttcttggccctcagccatatgaattatccaatttgattttcagatttctctttttttctttatacagcttaaaatgacatattctctaactcattcattcaacatatcatttcttcttgaaggcctagtgacatagaaatgagggtatctttagaaatcattagaaattttaaatggttaaatgaaggagctttagaaaaccatcttaaattaggagcttagtgaatgttgctttattttttaattcacatatagtaaatgaaaacatgaatttaagaattggccaggctaagattcaaattccagtgccaccatttataaataacatgagtgaacttagacaatttaatacagcacacacacacacatacacgcaaacacacacacacacacacacacacacttttgcctaatacctggaacatagtagtaaatgctcaatatttttttactctcaaaagcaagggcagcataggaaatgaccctctcaagtcagatcaggagtggtgactaaatgacaaaggaccacttgtgcagacgtccttgtgtttcttcatcttagctttagggttttctttcaagtgtccagattgcacctatattacccttgggtaagagccaatgagataatccatacagaatgcctagggcagggtctggaaggagtaagtgctgtataaaattatccttcttcttctttcacttcctctctttcttggggctgaccagctgataaactagtcctctgtcctagattgtgttccccagaaacagaccttgaaatgaggattatgtgcaggggatttattagggaagcatctcaggagagactggcagaggagcaggccaaggaagggaaagaagacacatctgggttccatttcaggtgaagttccagcctcttcatgacctcatagagtactctggaacataaatagcacctcagagtatgtcctgcctggaggcaaggtagcttggcttttacattccttcatccatctgtcactggctatgggccctcctgggtgggctatcacctcccaagcacttccagctctccatagtgttagggcagttgcagtagcaaaagagaaatttctgaagaaggctgctacagatactgctgcagcagtatcttctgttgccatccagattaccatttccattctcagccttctgaagaaggctgcagttggaaataaagcatgtaaaagctgggaatgggagcacagaccctgcaaaagggacagaggtggcaactctggtggcagcagcagtatctgctacgtcctcttgggttttataggcaccagcaaaacacatcttttgttaaaatggtggccttctgacgggaagggcaggtctactactgaggtcaaaattcatgtgttatttttgtaagcagctactaaagcagtatcagtccagagaaacgagtctatctttgaagaccaaatacccaaaagatctgcttcaaccttccccagttaatcttttgccagaagattcacaatctgaatgtggctgtgagtatttgattagagtattagtaggtgaaggaaggtggtatgcaagaatcagctttaatattatccccgtagaagggaataattggtgattagttttcaggctatataggactattcctcctaaatgaatggataagctgagagatttacttctaaagaggtatggtcttttcattttaactcgagattttaggaaagaccaacttaaaaagaaagcaaaggaagtttcaggagatttcagaatttagaaggaattctgaaattctcttctggggaaatgaaatcctaagacttgcatggatatttctgaaaatcaaaatgaaatattttggttgcataaatcgtcaactgtagtttttaactaaggaaatgtaatttaaaaaatccaagtgttcgatttacataagaaatagagttatttaaatagaagatttccaaaacgctgttagtggtctttgacgtctttaaaaaggcatttatatttgtgaaaagatgatctattttaaggtgtaattatttctaatgtgcctcattttggggtctcttgagagattagaaattgctaataagcaattttaaatattttcgaggtaagttaataaaacacttcatcggtaattcatgacttgttatcattctcacattatccttgtgtgggtaaaggcctgtccatcattggaagtaattggaaagaaaactttgcctgaagctacatgagaactggaacccttaaatcatgaatggtggcaagattccaaaattaattatgaagactattggaatgatgtagcatcctttaactcttattgtgatcgacagaaagtatcatagatggacaactcactttccctttgctctgtgcttcctggtgattttaggtcacgtccactctgaaatctgagctgtcattaaagccatgtcttcgtgtctgtctgtctgaagcagcaaagatgagacagtctgtcgctgtgtgtgaccccagtgagccccataagcagaaggccctgagtctcaatttgtttcttttgattactggcagatcactcactgtgccatttctctgatgtgactgagcatattagctgtgccctcccctaattattcatgcttccaatgttacccattcaaaatttatgaccatgaggatggtgggttagaagcctgaggaactgaggctcaagcctgttgccagagatttactgtcattgttttaggtgcaaagtattaacaggcaggccaactcacttcaattcctgacttagtacatttagtggagaattagttgagaatgagtacattttccctgacacagctgcaaaatcaaacacacgaggagttattgaaaaactgggatttaagcttaaacctatcatttctatatctgatgggcgccatcccatatctgtgaaaatctgacattggggaagtgaaatgcaggcttaaaagaatgctttcaaggtgcatagcaaaagcaatcttactcctttagtgtttcccatttaatacttttcaatttttagttagttaattaaggagaaaatcacttaataatcacataacatagattgctactataaatacctgtattgtctatgttacaattttcgcatctattttactttattatttgtaatctgttgggttttgtgaccttgtgctccaaatgattttgcatctgtaaggtggttgggagttagatacccttcatcatatcttttgccatctttgagtggcttttttaacctttccttttaaaaaaaaatcccttaatccacagtctaataaagtaggaaaaacaatcaataaagcatacctacaaaagttccattttaaacttttagtgaacttaagtttactcatagtgcatttaatcttcctttctgtctgtcagttagcaaatatttattaagccccaacaatataacagagacattgctggctgccaggtcagggggcaagagccatgatgcatttcatcttactttgaggctgtcggtctacaaatatttattgagctcccaacaatatgccagggactttgctagctgctgtggattcagagatgaaaagacatagttccttttattcacagaatttacaggagtgatacaaacaaaacaacataggagacataagatatgtactctgattgtcttggtctgttcagactgctattacaacaataccttagactggttaatttataaacattaggaatttattgcttacagttctagaagctgggaagtccaagatcaagggcaccagcagagtcagtgtctggtagtggtctgttctcatagatgagtgcttttaaactgtgtctgcacttgtcagaagtgcaaagggacaaacaggctccctcaagtctgttttgtaaggacactaacctcatttgtgaggggatgtcctcatgacttaatcgcctcccaaaggccctacctcttaatacgatcacagtgggagttaagtttcaacataggaatttggggggaacacaaacattcaagcaacaacagtgatgatggttaggccaagaacggtgcagtcctcaaggagaaaagctttatatctgctagggagagtaaggaaagtagccttggagctgaggcttggtgcacagagaggagtttgccaggcggataagagcaggagaggtctttcaaagcaggggaaacaacatggtcaaaagcatgaagacctgccagagcttccagaatctatcagagactttgagttgttggagaatgaagtataaggcaaggagtgactgcagctgaggcatggttggatgagggtcagattacaaagaaactgtatatgctgttcaaagtggttcctatattttcttcctgctggttattagaagggcatgtgccccttttaggaggcatctgctatggttaagataatagaaaagggaattttcctacaactcagattacatagttgcgagtgagacacattcctaggtccctctccccaaaaagccttcagaattggaacagattttttgatggtgaagtttgtggtgacatcactggtttgctgctctaaaggccactggaattaggaatgcccgtggatgaaagatattttttgccatggacttaggaatctgggtgtgagtattttctcattggtgggtcaagactgacagctgccctctgcaagctctttgaaaaggtaggaagccctgaaggacctaggtgatgctattacttgatggctcaagcagatcttcacaaattcaatacatgaaagataggaagtaagacgtatgagtgatgggggagtgaggttagagtggtacatctatcatagactggatagaaaggaaagaaaagcagaggaggggaggatacacaacttggcaatgtcgagatccagccatccaaacaagcatggaagtccttggtgaagcttgactcccaaggggcattgctttgcatcaggcacctgctagtctctgtatgcaaagacagcatggctcttctagactgtaatgaatagccaccaaaatctcttggatgtgaacctgctgacttcccttgtgaaaactatgcctaaaggtcagtgaatcctgttttggagctgcttagggtcactaacaccaagaaaacttcatacttcacttttctcttatccctgcagaatgctggaatggaagaaaaaaaaaagatgaaaagtaggtcatataaattggtaatgcctaattctaatccagtgatctcatatagcattagaataaattagaatacattttgatgaaaatttccattttattaaatagttgcttcgtgcataagcagtgcagctggaccacactgtttctaagattgttttcaataaaatctcattagctcacaaggcaaattgaattctcacttgctttccccatccactgtcccttactcacccctgctgtatatagagcactgagtgtagaatttcgctagccagaccacttactatttgacagagatgtgtatgtagggaacagcattaagctatgccatgacttcctgtcatggctataattagcatcagttcaataggcttgagttaaaatggtttctgtggtgccattatagctttgttttgccttacttatatctaggtgaccacatgttcaggtttttctgggacagtccctttttatgcctgttttctcagtagaaattcttaataatgcccattctcactctctgaagtattccagtttggattaacaataatatggtctcctgtagcaaatactatgagtgttctcatagccctcagacctgagcattccagaatattcttactggcatcagcctgttgatatcatgtgcagagtgctctattgaaacgacagaaactcttggcccactcaccaagctggaattcagaggtattgacttccctaagggcatccttcagccaataactgataggaattggtggtcaaattttatttgttgttgttgtttttccttgttgatgtacagttactctagcactattcacttagaaaatttccttttcctagtccatttcattggcacccttgtcaaaaattaattgattttatatatgtcagtctatctctggactctcttctgatccattgacctacccatataccaatacgagactgacatatttatcctcaggtgactttaatttgccactaggtctgagaatcaccattttcgacaaaccatgatttattgcctggggctaaatgcatttctggtctacatgaatttgtggttttattcacagaggacaggaagaatattgagttgatatctagcagtgtctctcttcacatatatttatttattttcaacttttattttagatacagggagtacatgtgcaggtttgttacctgggaatattgcctaatgatgaggttttgggtatgaatgttcccatcacccaagaactaagcatggtacctgagtttttcaactcctggtccctttcctccctccccactctagtattccccagtttctattgttgctatctttgtgttcaccagtatccaatatttagttcccacttataagcgagaacatgcagtatttggttttctgttcctgcattaatttgctcaagataatggcctccagctgcatctatgttgctgcaaaggacatgatttcgtttcttgttatggctgtgtagtatcccacggtgtacatataccacattttctttatcaaatccacccttgacaggcacctaaattaactccgggactttgctattcacacatatattgaaagcatttatactaaacaatatgtttgttatgaatagtgctatattgtacacatttcagagaaccttttccctgctaaatcttcacgtgactcttggacacattgtctttgtgaccactggagcacattttgaagtcatctagtagacttttccagaacacatatttttcacttatatttatattgtttgaggtgctgcaaacctctttaaattgtgtacaacatttgcaattgttaggttatacccacctgggaataattactaagtctgtgctcatttttgtttaactttctgatatatttgtttcatttaagtaaacctctagaagtatccaaactaggattagtagaggtaattttgggctaatgtatcttccccaaacattgttctgttgttcaaaataaggtaattacgaagacactggtaacatgagtgactttgttaggacttgagtataaatcaggctcctctttcctgaggagtgcttaatcaagaaaaaaaaaggcttttcttcatataaaggcttatgtaatatacaggctaccaatctttggctttgtaacttcgtttgactatagtgcaacctgatatggttgacttattaggttgaattattttataccgctacgaggcactttttgtttaaaataatgtatgcctcttccagaagatccctgcacatcacacattcaaaactaactagattaccaggacatgggaaaatggtgtcatatgtcttagttgctgaaggttcactttatcttgaataataaaattacagatctacctagaattgaacttaattgcacaatattgtatttcctttgccaattaacccaatggaggtttgaagtaatatatttgaaaaatgctttgtaatctgaaaagcaccaggcacttgttaatcgttgtcattactatattggaaaaactacctgtggccacttgcaatggagaaaaaagtcttaacactgagcaaagaacagctcaacccttaggcaagtactttatcatcaaaacattttccgatgaccatgattcacagcagatgtaaactaactccagtgtttttcaaactagtggtcttgacccacgggtaggttatgacatcagtttattggttggacatcagcattttacaaaaatgaacagtgcaatagaacataacagaatatactagaaaatagtaatatcagaggtagtaaggataaatattcttttgagaagatctccatatatatacatatacacaaacacacagatacaaacactggatggaagtagaaaatgttctaattgtgactcattgctcagaaacaaaacagaacaagacaaattcaataacaatgtcattgccctaatccttatttaagatttttaaagaatgttatagttgtccttcagcttagcagttattgtattacttaaggtatgatacaaaatgttaagacttttatatatcatacgcttataattcctgagttcatagagggtctaagattttaccattaatatccttctaataaagcattgcattattgaagacaaccagttagccagttcaagtcaacacatttattaagaattaggaatgtataaaaaatataccaaggaaaataaattaagcttatataattatactttatgttaaatgacagtttaatttcttctatggggtgtaaatatttaataaattgtcgatattcaaaagaccaatacatattttaaaatattctgggggttatttttacatacatcatcatgatccccataatgacgtttcaatcagcgacgaaccacatatatgatggtggtcttataagattataatatcaaatttttcctgtaccttttatatgtttacatatacaaatactttccattgttttgcagttgcctacagagttcgatacagtaacatgctgtatagtttgtagccaaggagcaatgggctataccatatagcctgggtgtgtagtaggctacaccatctaggtttgtgtaaatacactctgcgatgtttgcacaatgaagtcaactaaggacacatttctcagaaattatccccctcattaagtgatgcatgactgtatttcctgtaatagagactgtatctgttaactattgctatataacaaccatcccaaacatagtaacttcaacaacaaccatttacttagtgccaattctatgagttagcagtttaagctggcctatcctgggtggttcttcctggcttccttgtgtgtatggtcagccattctgctaagccactctggttctgagagtcttttggctgtttgcctggggcacttcagttctcctctaccctggtcctctctaatcctcaacagactaactagcccaggcctgttcaaagggcaaagacagggctccaagacaatggaagaattgaaggcatgttgaggcctaaactggatcaagtacagtgtcactttgaccacatcctgctcgctataggaggtcacaggccagcccagatttaacaggaggggaaaataatctccaattttttgatgggagaaatggcagagtaacaaggcaaaaggtagagaaaaaaataaggaggccattaatggaggccatgaatgcagtcaacttatcagatgctcttctcctccctacccttttcattggagcaatataaagaaatccttcagtcaagtttccataaagaccctctttcctgcttctggctgagctcctactaaaaagaagattaatgtggaaattaatctaatccaggattaagagtagaagacttacttaaactgggcaattttctgtcaatttgattgtaataaatattttgcatttaagagtttactattgctaaaggaaggattgtgttttctctgggagcattgtgaatcttgtgttactgaacaaatgatttcctaaaagggtatgggtaaatggaactgtaaatcaaaccaaattttttattttgagcccgcaatttaaagggatcgttttacatgtgttctgtctccagagatacctctaaaagttctaggttttagatgaacgattccccaaagcaaccttcacctggagaacataattcctatatttagcttaatacttgggccagaaaggctaacatgtcatttacagtttacaggtaagatgaatgtaatctccttagagtagtttcatcaaccaagtctagaaaaatcaggtactagagtgatttttacacaactgtttcttattgaacaaattacaaaattagagaaaatgaaaaagaaaattagaaaggatagacttaaatatctactcatatggtaataattttataagaaaaaaatcaaaatataacatctgtttctacctgcctggcctgtgaattttgtagtctaatataatgagagagataatattacaaaatagttaggatggctgacttcaaagacagactgcttgcgtttgaatttaagcttagttatgtgttacctgtgtgttctacattatttaatctttttacgcctcccagtagaacagggataataatggttcctacgtcacagggtgattgtgagaattccgaaagtcagtatgtgtggaatacacaggccagtgatcaatgcctggtaggcaataaatgttaactctcactgtcaacactacagttggtttctattccaaccttcatgaattttcactgatttttttcacacttgtttaaagttacatgctgtatgcctctgccaggggcctgagagacagagataaaggacaaagacactgttcccaagtagcttgaggtattggatgaataccccccgaccacacacagatgcacagatagtgatgccacttgtaaaagggatataagacttaaaggtcattcagaatgtccatgagactcgtttatttttaaggtgatttctaatatataattttgtgaagcaatatgcattttttaggctgttggctaaaatgcaatgaattacctagatttactcaagtttacactcattccacatgtttttctaaatacagaaatttctcattatgtatggcatgatttttttaaaaagaaacattatatataaagagtacgtgaagcctaagaaaagtggcacattctttactcttgtaatatgccagcatcttattctttatttggtggtttctaattgttccctaaaaatgtaccaaccataatattgactgaattatgccacaaagaaaagaaagtgattatagttctcttcatagatccttggacctcatataaagcattgattgattgtggagcctgcctggagaacaggctgtatcagtgctatagaatctttactactaacttcttagatactcttgatttggtctcattcgtgggtttacatttgctctggaagtggtgagcttagatgatagaaaaacgtttggtatgtgaatttcatacacttgaagaaatagatcttgagttcagtttttccctgcaaagtgctagaccttaaaaatctgatttgcatagactggaattcattgatttaagaagaggaatttattacagattaataataattacttctgaagagaaaatactttgaatttgggattctaatacttatttaaaattggcgataatttcactcttaccaacaaatacactaattctgtttttaaaatttcgattagtgttatttttggcttaatatgcacattgttaagccatgtgggtttttttttctgtttttaaaatttaagtatactttgcacagagtaaaaggtacctgtatgtgtctacagttgtgcgagtcttaacaattctatacattcatgtatccatcaccaaagtcaagatatacgacagttctgtcactggcaacatttccatgcattcttttgtcattaacccctttctccggtctctggcaaccacagatttgtttcctttcccaaaatataaatggaatcatacaatatgtagccttttgagtctggctcttttcatgtagcataacgccttttagatttatccatgtatcagtgattcattctttttcactgatgagtaatattttattggatggatactcacagttcccattccccacttgaaggacatttgtttctagtttttggtaattacaacaaaagccatttaattatgttcttacttgttttggaaaaaatccaataaaatggtaaaataatcactttgtgtgtataggagtagggtgtggcagggaagtctgaatccaaaggtgttactctaagtctctgctggctgggcatggtgggtagtgcctctaattagagcactttgggaggctgaggtaggcggatcacttgatgtcaagacttagagaccagcctgggcaacatgacaaaccctatctctactaaaaatataagaagtagccaggcatggtgacacactcctgtggtcccagctactggggaggctgaggtgggaggatcgcttgagccccaaaggcagaggatggtgtgatccaagatcacaccactgcactccagtctgggtaacaggatgagaccctgtctcaataaataaataatataaagtctccactaaaagcgattatctgttgtctactggtataatcaggcataccagtagatctcagactgtgttcccatttgattaccattgttttgctgcttaaatccaaaatatgccaattttaaaaataattttcagaattagtacattgcatttcatcaatcttaagttttcctctaataaatcatttgaaatacttgggtatctcacagaggatcccgtgttacctggtttggcacacaatcattacattgattttcctgaagttgaatctagtaatttttgggtgtctcacataagcatgtaactttcagactctctctccctaaaaaaggagtgtcacaagaacatattctaaatcagtctatctggatgtgaaaataggactcttcttgtgttcacagtggccaaggaataaagactactacattctttttcttttcatttcttgtttctttttttttcttttttttttcagacagtgttgcccagactggagtgtagttttgagatcatagctcactgcaccctcaaactcctagactcaagcaatcttatagcctcagcctccttatcagctgggactacaggcacacaccgtagcacccagcattttttttttttttttctgttagagacaaggtctttccatagtgcccagactggtctcaaactcctgggctcaagcaattctcccctcctgagcctcccgaaatgctgggattacaggcatgaaccactgcacatggcctaccactacatttcttaatgaaaatcacaaagtaagactgggaagcttggagaggctgagaaagctgagagtgggtcctgtggaggactttagggagagtcaggaatgttgtctgagtcctctcttacacctctagtgcagtgagatggggcctaacaggaccacttgcaggatggcctgtgaccagtgtgggagtattcttagattctgtccaaggtgctgttataagagggacaagcaaatcctagcttagataagctagaatcatctatgcctggtgctaaagagggaataaacaatgagctagagggaagcatagcatgcccatccaaagagctcctaaagaaagagctcttgtgggagcgtggttagcagtgttgttcatgtcatctataacttctatacccaaggcatgtgcattcattctcaagctgctgcgggtaccagttactagaaactcatagctgcccccattctctggccaactgccctgggctgacaggagtcccctttcccagagatgccttgtagtttatgccttccaccaatctggagactgcccatggtcagcgaccgaaaaatgcagaggtataaaagaaagcacggctgccttgcctcaagacctcacagcccttgtgttgcaatccatgctccagaggtctccaagggatcgggtggggactaaatttcatctgaaacaacatgtttgtcaagctccttctactgcccccttctgcttctcttgatcttttagagggttcttctgagagcacttcctcaaaaatcatttgcacaagaatccctgtctcaggctctacatttagggaaccaaacctgatatagggaactctgagaaacgcccccaataaaacattaagaggagagagagagagaaagagaacttcatacacttgccgcgcttagagagcatattgacatgttactactttaacaatcaggtaagaacccctctgcctccccttatctcttcactaagctcctctaagtgccaaaattcatgttagcaaggtagaaaaggagatgtctaactaagctatttagggaaacataccttaaggctattaaactctttccttcctataagattccagctttgcggttgatgtcgagccttatgaagagaagctttaacgtgaaatgaacgtgatctttccatgagccattaatggttgaccaggggatctgggagagtataactagaaaatttatggagacttttatctaggagcccaagaataaccaacccacctaatttattgaaggtgacagtggggtagagtgcatgatatctcctgagtcttgcctatttggttacctgttatcctaaaacaattgaaaggacaaaaacataataaatgctgaatcctgacaaatgaagacagaaaacttacttttcttcttaaaccaagaggataagcattgtatttagtattgagattaattctcattgaaataaagtccatcagacacacaagtctccatgtattattggtcatccagacattgagatctaatccatcacaaaagtctctatgagttagacatccaggtagccccacatacatctcagacagggcactcttagctgctttcttcttgatggcagctggggattattccttcccttcattttttgtttttatgtgcgtttttgtttgtttgtttgtttgtttttgagacagagtcttgctctgtcagagtcttgccaggctggagtgcagtggcatgatctcagctaactcactgcaacctccacctcctgagtttaaggatttgcctgtttctcctgcctcagactcacaaatatctgggacaacaggcacatgccaccacgccaggctactttttttttttattgtattttcagtagagacggggtttcaccatgttggtcaggctggtctcgaactcctgacctcaggtgatccacctgccttggcctcccaaagtgctaggattacaggtgtaagccattgcacccggcctttcttcccttcttaacacaaggaaatacccaaatattagagggatgcagcagtggggaatgtataatccatggtgtctttgtttcgtgagaaccccaatgaagaaagagaaacagggagacatagtttagagcatgccgctcagcagaatttagaattgccttcagtcactggaagagtctaggtgtacctggctatttgaaatatatgaatacccagcttcattatctgaatgttttatgctccccaaaatttgagctctcttttcgtacaggctgctataacaaaatatcatagacggagtggcttaaacaacagacagttatttctcaccattccagaggctgggaagtctaagatgaaagtgccaacagatttggttcctggtgaggacctgctttctgacttgcagctgccttcttgctgtgtgttcaactgaccttccttttgtttgtgtatgagggagaaagagaatgagagagagagagaaagattcgtcttcctctttttacaagggctctaactccatcatgagggtccccctctgatgacctaatctaaacctaattacctcacaaaggccccacctctaaatataatcacattggggattaagggcttcaacaaatgaatttgggggaacacataaacattcctaatgcaggacaggcaacatttcagctctgccactgactgcccaaataatcctggacaacttacttaacctctctaagcctcagttttgtcatctgttagatgggaatgaatgagttaatatctatagtaccaaaaaaaaattgtgtctggcacagagtaagtgttcagtaactggtaactgttgattattagcctgggttaaactctggagtagttaagaaatgaggcaatttctcattactagaagaaaaatcaaaatgactgtattaaaaaggagatgctgagcatatcatcaataaaagttttaattggttcaatattatttcagattgtgacattaaacatcactttcaaatgctgaggttatttcctcaaatatgacatcagttgactcaatcccattaggagaaatttgaacgccttcactatgtaacataaaaattgctaattctttccttattatatattataatcatgtgtcacttaatgctggggattcattctgatattgtgtgaacatcagggactgaacttatgcaaacctagatggtagagactactacatacctaaaatatatggcatagcttattgctcctaggtacaaacttgtacagcatattactgtgctgaatactgtaagcaattgtaacataatggtaagtattcatgtatctaaatgtatgtaaacatagaaaaggtacattgaaaatacgatataaaagataaaagaacaatggacctgtataaaacacttaccatgaatggagctcctaggcctggaagttgctctgggtgagttgttgagtgactggtgagtgaatgtgaaggcctaggacattaatgtacactactagagaatttataaacactgtatacttaggctaaaataaatttattttaataaacttttcccctcaataataaattatccaccttagctactttaacttttttactttataaacttttaaattatttaaacttttgactcttgtaagaacactcagcttgaaacacaaacacattgtacaactgtacaaaaatattttatttctttacagacttattctataagtttcttcaatttttaaatatttagtttttactttttaaacttgtttgttaaaaactaagatgcaaacacacacattaacctactcagacagagtcagcatcatcaatatcactatcttccacttccacatcttgtcccactggaaggtctgcaggggcgataatatgcatggaactgtcacctcatatgatagcaatgccttcttctgaaattgccactgaaggacccacctgagactgttttacagttaatttttttctttaattattaggaagagtatactctaaaataataatgaaatgtatagtatagtatagtaaacacataaaccagtaacatagttgtttattatcattatcaagtattatgtactatacataattttatgtactagagttttatacaactagcagcaatatagttttgcttgtaccagcaataccataaacgcatgagtgatgtgttgctctgcaacgttatggcagccatgacatcactaggttataggaattttttcagctctgttataatcttatgggaccactatcatataggcagtctctcatggactgaaatgtcattatggggcacatgactgtgtgtgtgtatgtaggtacacacacatatgttcatctcttatgcctgattttgattctttattaatgtggtgtaagtcaatatttattggcagcaaaggatattttcaccttagcaaatgacagatatgaagtttcattctaaagaattttggtgctttcctcctactgccctggggaaatgtagcaatccatgtaatctgccaacatgtatggttggagatgcattttagggggtcagggagataattaatgaggaaaccttgagagtcctatccctatttctagctcttacctcaaaaggaaattactcgtaagtccaggaaatggctacgctgaaaatacttgtcatttgtctgacactgtacagaattctatgtttaagatcatcagttttagtggcaggtattcttggacttaatcctacctctaccaattacaccagtcattagctgcataattttgaacaatctcaatcttctcctccataaaatgggaacagcagtgtctattccttagagcagttgtgaggattaaatgagtgaatgcatataaaaaaacacttggtcctgaatctgacacatgaaagcactgggatagttgttaccatttgaattgtctaattcagggccttttcattccacaagcgaatggcgaagtaccatttaagacttgccaatgggtgggggaggcatttactatccaaataattatatcactgatcatgtctaactgaacacatttttggctagaagggaacttggataaaatataaaaacagagctttcacaggcatttttgttatttcatttatgctttgaaaaaaatattttggggcacctactattatgggtagctaactgcatctcaaatttatatcttaatgtgttcttgtcctttaatttttattctgcaacatatgaacttcagtaatttctaatttccagaatggtggaacataaatacatgtctccagttcctatcaactttgctaagtcataataatattattaacaaaatcatagtctttttctttaacctagcaacagttacttaacaataaaagcaggtgccaacacagcaggaacagtatttagtgttttgtgagtcattgtttttattatttttaactttttttaccatcaccttaggaaatcatacaaatgtcattgtggaaatcaatcattagagtaaggtggaggactaatttttattgtaaaaataaccatatttacctggatacttatttagaatctaagtaagaatgcctgtcttcttgaatcccttactttatttagtcaaatgctaagttaacttgctgttaaggctttgggttcttctttttcagtcgatgtcagtgttgaggctttgtgtgttggcaatttttagttgtgtatcgattaaccattgctacaataatgctatgtaacaagccatcccagaacttcaggcttacaacacttacttgtagtttctagtaatatggttgcattggttctactgatctgagcatatcccatcagggctcattcacatgcctacactcagctctgtattagcttgttggtttcatttgacttggaggggcaatgatgtggctgggctctcagcagagaagaatgggctctgctccacatggtacctcatcctccaagaggctagcactgggtttttctcaggctagtccagtcataatatcatggcaatcacatagcagcaaaaagaaagcataaatgctcaggcatcatttcttcttgaatcgagtcagctaatatcctgttgcttaaagaaagtctatggccaagccaagagcaagcgtaggagggagctacaaagttatagggcaaacgatgtggctacatggaggctattaattggggtgctaatgaaaccaatctaccacagatggcatggatccactgcatatggaagccaccacctttcaggaagacctccccaactggacttttaaaatagcctttctctccagatgccctacctatcatctcatctgcctgttaagaatgggtacatctgggccgggtgcagtggctcacgcctgtaatcccagcattttgggaggccaaggcgggtggaccacctgaggtcaggagttcgagtccagcctggccaacatggtgaaaccttgtctctactaaaaatacaaaaattagctgggcatggtggcaggcacccataattccagctacttgggatgctgaggcaagaatcgcttgaacctgggaggcggagggtgcaatgagcctagatcgtgccattgtactccagtctgggcaacgagagcgagacttcgtctaaaaaaaaaaaaagggaaaaaaaaagaatgggtacatctgggatgaccgtaccttaaatacaagacatgacctgttaacactgccaaaaagaaatgcttcagtgataccttctaatggtggaggaacatagcttgtcaatactcagcaagcaataatcatgccttaagggttgatgttggctttgtgccagatccccttgggctggtgattctccagctgctgctagtgttggcttttattagcccccaactgagtcctatggagaactgctcctagcccacggttcacatcccacccactgccttctgcggggtagcctgtctgacacagtgcaaacatcccaaccagttttcctcaagatgggacatctctgtggtataatccatgctccagaactcccttgggtccacgctcagggtggactccagctgaggccacagccttactcagctctgcctcattcactttctgcttccctccttctcctgttcctgagagtcactctcaagaaatcacgggcatcccaatccctgtctcagactctggttttagaaaactcaacctgaaatacatgttacaatgttattttctgtcattttcttttgtttttttaaagcaaaaaaagcatagatttattgaaacaaaagtatactccacagaacgggagcgggcttgagcaagtggctcaggagcccagattacagaattttctggggttcaaatactctctagaggttgcctattggttacttggttacaccctatgtaaataaaggagtggcccatgaccagtttgattggctctaggagaggaccaatcactggctgaagcagagttacaaagttacatatgaagacttggcccacaaccagtctgattggttgtgggacaggaccaatcagaggtactttccatctgtctttattattattattattattattatactttaagttctagggtacatgtgcacaacgtgcaggtttgttacatatgtatacatgtgtcatgttggtgtgctgcacccattaactcatcatttacattaggtatatctcctaatgctatccctcccctctccccccacctcatgaccggccccggtgtgtgatgttccccaccctgtgtccaagtgttctcattgttcaattcccacctataagtgagaacatgcggtgtttggttttttgtccttgtgatagtttgctgagaatgatggtttccagcttcatccatgtccctacaaaggacatgaactcatccttttttatggctgcatagtattccatggtatatatgtgccacattttcttaatccagtctatcattgatggacatttgggctggttccaagtctttgctattgtgaatagtgctgcagtaaacatacgtgtgcatgtgtctttatagcagcatgatttgtaatcttttgggtatatacccagtaatgggatggctggatcaaatggtatttctagttctagatccttgaggaatcaccacactgtcttccacaatggttgaactaatttacagtcccaccaacagtgtaaaagtgttcctatttctccacatcctctccagcacctgttgtttcctgaccttttaatgatcgccattctaactagtgtgacatggtatctcattgtggttttgatttgcatttttctgatggccagtgatgatgagcattttttcatgtgtctgttggctgcataaatgtcttcttttgagaagtgtctgttcatttcctttgcccactttttgatggggttgttttttgtcattttctctatgtattttttttaaattctcaatgccttgaaaaaatagagaaaacttcacagatacaaaatgagattaaattcagacatttatgagatatatttttaaaggccctatttcaaaatattcagtgcacatgtatgtattgaggcagtcttggaggaagggacatcaactttgcttcagagaaaatgaatttatctcctcagtctacctggctctgcacttattgatcctgagaatttatgaagaactttttttaaataatttttttattatgctttaatttctggggtacatgtgcagaatgtgcaggtttgttacataggtatacacgtgccatggtggtttgctgcacccatcaacccgtcatctatattaggtatttctcctaatgctatccctaccccatccccccaacccctgacaggccccggtctgtgatgttcccctccctgtgtccatgtgttctcattgttcaactcccgcttatgagtgagaacatgcagtgtttggtttttcgttcttgtgttagtttgctcaacttgattctctgtattctcatatgcaaaatggtaataataattactattgcaagggattttgttgagaattaagttaaatgagataatgcatgtcaaaggagtttcaagggctacagatatgctatttttacttgtagactgtattttcttataactcagagctttagaaacccgatgcaactacctaatgccagtaaaatggagtcgtaaagtaataaagaaaactgattgtcttgtttcctattttttttgaaaactgattttgttgcttactgtttttatcatttggtcaaaactgaaacgtaagttttgtatctctatccagatacaaagacagatttttggctttcgttacaacagcacagtaagatacaaaaatgttcacttcattttaatgttatattttgacttcctctcctgaatgctacttcaggcatatggcaaaataaactttcaaaattaggaagctctgagaaataaataataatgtaaacattctttatttgtgaaatgtagatcttttcctttaaaaaaaaaaagcctggctaaccttatttaattctactgagctttacaatttgggggtattataatcaggagattgtagattcgagctgaaaaggacacttttcttggtactgcatcagtggtaaaattcacctgtgttttgggttagtccagggttaaattgaaaataatactttttagtatttgtggccagaatgattaccaaacaatctctatcaaaacagccatttcttcttaataaaaataatgttccggagatgttgcatagcactgtgacccagattcacacacttgtgctaagagtacctgtgtgtgcaaagacttctcttgtcatcactttcctaatcacattacattgactttcttcatttctttctcccccacaccctgcccttcaacttgctaagtacacagtgtattttcttcctaaaagactttctttttggttcaaaaatatttttttcaggaatttgaaagattcaagggaaaggaaaagagttagctgacttagattcaagtcaaggttgatgctgattgttatgtaacatgggcatgtaataaatgggaatgcaaatctccaagactgttgatactggacaaggtttggggaattttggacagagattttcatatatgttacagcatcttcagttaatgaggagaaactatatgtgcttagattgatagataagtagattgattaatcagtcaatatactgattaatctgaaaaaaataggaatcacattcttcaaagaaaactcagtgatgagaattcttaagatgaagatcttaagttttcattctttggtatttattctttagtgtgtgtttatcctgctgtctgtgacttaaatccaatgtttcctcttctactttttgaaagtgaatactggtagaagattcttgcttatttctgtcaatagggtttgaaataattaatctgacttgattaaatgcctcagttatatagtagcatttaaaaaattatggagccactgttacataattggcctcaatcccatcttgtaccccttttgctgatagagcaaaacaaacctacgcaaatatggaagaaattacccacagcagttaccaacccccgtgctgcttagaagaatgcattgttgtgcataaactcaggataaaaatactgaacatttttcaaccatggctgtgtgttgatttctgtgccattgtgttttgtttgctattttaaatttttgtctacaatgtttcactgacagtggtagacatcattcccttagatgcttttggtttgcctagaagaaatgtgggaataaaagagatgaggacgattacactttggcttccttcaatttttcttttggcagtttagtctaacctcatcttcttttgttgattttgtaatatgagaatttaaggcattcaatagtaggttatatgattgaaattgttggccatctctacttccatgaagggtgtgtacatacctacctccagtagaatctcaatatcccattgtaattcctgatagaattaagaatccatgctttagaatgaatgaaaaccttaaaaccaggttaaatttattttatggaaaaccatttatattactttaagttcatggttcttatttgttcctctcattgttattactttttgagtctttgatcttaagtggagaaatttctgcagaggctcctcaaagaagtagcacatatataatagctgggtcataagagagcttgatttataaaatgtttgattaatagagaaaagaggcaaggtagagagtcttgtctccagaaacaaagttgtctttaaaagtatgtaaaattaaagcttgaatctcttggaaccaaccaagacagaaataaaattaatattcatgtaggtgtatgggctgaagcatcctacaatccaattacataacagggacaaactaaggtaaccctggtgtaatgtcttgtaaaagaagaagtgaggttatataattagactgcatttatcaagtagcacattccacctacacaggctctgaagaaagaaagaggaagtggggagggaaagatttctaaggaataatgactaagaacagtttgatatgtacgtttgtgtcatcctttcaagattttttttgcttttagtattatgcatagcatcacttaggcgtctaatggcttacagttttgtccttcaaagaccttgatcaagccagtctttggggcaaaaagaagagcttagatatgggtggagggaaagaaaaactggaccctttaagaattgtgtctaaggaaaacggtcaagaacagttaactaagaatatgtttacttggaaagatcattttcatattggtaagtagagttattaggtgaatagagagcatatgttttgtgccttgagaggattagactagggtaatattatcactgttgataatgcagatattgcagtatgttttgttaatccaacaaaggtatcataggaaggtacaaaagatagaaaaaaaatccaagatggtaataaggagctttattatggtgaccagtatacaggaggggcaatggatagggcagaatcattcgaaccaccacctttatggttgtctctgtttcactcgttcagcatcagtccttgtaagatgtttctcagtgctgtgctattaaagttgaaacaacagtaattcctgctgaagaagtatatttagccaattgacctcgagtatacccacattagaaaactacactccaaaccagtttcccaggttgttttctcctattctttccagtgttggagtttgttggaaatgctaaggaaatgtcctcgcaccaaatttatcagatatcagaagtgtagtaccttttgcttgtctcaaacttggggtgatagctgttgattgaagaaataaaaaatattgaagtccctgctaagttaaatgtaattgctgaaatggccaacatttcatgcaatcagtacaatcatgcaatcatacaatcagtacatgaatactctgccatcgttagtgtttttgctccctctgagtgcaaaacatctggtgaggagcatgcagcacatgtatgtatgacttccccattttcagtggatgtactcattcctgacacaaaggagagcaaataaaagtaaagcaatgacaattaaaatgtaccaattccccaaatacagactgatgcaataataagtttaagagacagcaataatgaacaacaaagattgttgaatacatgagaaaatttgtttcaaattctaccctttggagataatcatcattaaagctggatgaactaaattttaacaaggaagttggcgagtaaccaaatctatatttaaaggctttcagcctaccaaatcttgcatgtatgtaaccgtcattttatgacttggcttttcatttcattaatattaaccaacaataacttccttttggctctgatggacttaagtctaaaggtctcgaagttgaaattggaaaaattgagttgctttttatactaatttctgattgctatttttacttcttttatggtagaggctatattttatatatacatcatttggcaacagtaattcacttctaagcttttatggtgcaaaatcaattgccaatttggtgataatataggcaggcactaatagtgctgctttgccacttcaaagcatccagcccgagaaatttcataagcaggaaacctaaccccgctggctgaactgatataaagaactgcctcttatgtgttcccttagatttgaatttttcaaagctcctctggaatattgtatttttggagcaatcacaattttcatttatttcaagaagttgatttcctgtaggcttcaaagatattacagttctgcatggattagttttaaaaaccggagtgagcatatgaattgtttctaaaatgtatggtgtaagtgccatgggcactggtatggaatggatatggattctgatgttccctcttccatataaagtgtacttgggaaaatctgtttcctgatctgtaacattcagacaacaatagttcatagaactaatgactcagaagatgcaaatgtatctccatatgttaatactattgaaagtaataggaagatataggagaaaaaatcatcatactgaaattagtagaagtgatgaatggaggcagaagaaactagctggatattttcagtggaaaaactcattttaaatcatgaataaccactgttagcaactttccatatttgctctcagtattttttaaagcgtgtcattgtttttgcaccacacacacacatttgtgtttgtatgtgtgtcaaatagtgaaaaaaatcacaaaatcagagccccaagtctaccacccagaaacaaccattatttcattggcttaacatcattttaaatatacatgcaattatcaatatagataaaagcatataaaatagttttataaaaactaattatacagatactattttaacatgaagccttaaaatttttgttttaatattgattgcctctctgtgaagcatgagaacgtttgtccccttgtgtgtccctccctctctgcctctgtttggatttttgttacttgtgtcgttttttttttacactgtgtatctctaaaacattcatggtgacttgaaccatgatttccatatttcattagtactagcactatatttaaataagatcaatgttctcctgcctcatttgccagggctttgcattcttaaattattcatcttgcttcttctctaaattgtctctatttcatcatcaaggtctatttttttaatatttttaggaagggttcagaagtgtatgtgttttatgagatcttccatgttggccaatgtcagccatttgccttaaaaattaatactttagcataatataatatttttggagtcacatttgtagccattgctccatgggcttctagcactaaatattgctgtgcagaagtctgaggagaacctgttctttccctgcgatgagttatttgcttttcgtgcctggatgcttgaaaaagtcttctctttattttcctctggacaaggatatttttcatagttgttttgcccttttttaaaaatcttgcttcgatgccccttttcaaacattctctcttgtcttttaaagtattggtgacttcttgtctttctttatctgagaacagaatgcttctttttcacaggctttttggtttgagagctgaatatttcacgttctttctgattttcttgagaagggaggctgaagggaatactgatgtcatatatgttctttctagaatttcaggtctattttctctcccgatactttgttaaatgtccagtaccaggtttgctttgcatcagcgtgagtgtgtgtgtgtgtgtgtgtgtgtgtgtgtgtgtgtgaagcggcacatggtcaggcttcattagctttctcaaatcattctgaagcagtggatgaattcttcccttaattcaaagaaattattgtttcctattgtcctcagtgagaagcatctttgctattactcagactagggaaactaccaggacacccattcaacttgtttctttctcaatttgtggttatgaacaagaattctcagtaagtttggactcaaccattgacttggaggaggcatcagtgttaggagtcagtgacttgctctgccctagaaatttctgttattttcttagctgtcagagttactgcattaggtctagctttgtttcttgtatgttcttgttttattttgtttataactgttttgcccatgtttaaatgtattctgtgaagtagtttttatcttctgtcttaacctgaaaatcagtaaagggttttaacctaagcccggaaagttactgctatttcctttgcagatggtgcattgtccctgtgggggagctgtctagagggtataaccaactgtgtgaactaggcctatcagaaggacatttcactgaacacctgctggcttttatttttttactttatcttttgtcagtgtcaagggtattatattttttcctttttttttttcatcaccacttacaagccagataagacagaacattcacacctcactgactttctttttattgggaaatttttatttttcctcttgatttattttttcttgctctgagtaggtttataaaactaaagtgaggaacattcagataagatgcactgtcaagattattctaaaccccagcatctttactattttgaaagcaaaacttaaaacaaaaaagattaattaaaaatgttcttaaaatttgaaggtgttttcctttccaaaatgtatttctgcaggaattcccactgatttgaaagataaaattgtatcagatcaacatctccagttaaaaagctagttttccatgttttatttccaaatgctatcaaggggataaaatttaaactttttttgtgcacacatgttattcacatgtgagaataatgaaacataatattccatttttctgctgtatcctttgctacatgtagagtgctgcttgggaaacctgcctcacagtatggttgtgaggattaaatgtgcaattatatagaaagcacttgataagcacttaatacatattatctgtggctgctgctcctttcattgttatgtcatacaatggaaatttcctcatggatttcttcttttgagtgttctttttttacactgttaactccttaaatgagatttttgcataatatttaaagtacaaattctattggttgtccaaagctctatttgagcttttttccaaaatatgttgttttgtttgataaaatgggatgtaagggaagccaatgggctatgttggagataggcctcgagtgcatcctttgtgcccatcttcagaaattggccctcagcctgaatcaccaagcccagtactgtaaaggattcatatatacaacagcacaaccatagccccgccatgaaatactgctggaattcaggagttggacttctatatccttgattttaatcttaaccccactcttgggtagcttcttcgtcttcttcttttcttcttcttcttcttcttcttcttcttcttcttcttcttcttcttcttcttcttcttcttattattattattattattattattattgttagagatggagtctcactctgttgccaggctggagtgcagtggcacgatctcggctcactgcagcctccacctcctgggttcaagtgactctcctgcctcaacctcctgagtagctgggactacaggtgcacaccaccaagcccagctaagttttgtatttttagtagagacggggtttacattgcatttctccaatagttcaattccctttgcacacatgaaaattatatgtgaaatcatcgtatatgaggatcccatcataccaagccatgtataaaagagaaggtattttgagcatagcatcctaagtctggattattttaaatgaatagttattgtacttgatgatttatttcaaatttcctctttaaattactgtaaatgtttcacaacataaatgctactctaatatatttcttagatatataaatgctactctaagatatttctatatatataaatgctactctaatatatttcttagatatataaatgctactttaatatatttcttagactcacagttttgacactaagtttgttataagtgcagaatctcagactccaaccccaacccagacatactgaatcagaatttgcattttactgagattccccagaaattcctaagcatgttaatgtttaatattacagaactaatatagttgatactgttaatagggaaagccataacactcaagagaaatatggatttaaaaggcctttaaacatatgagactgaagctctccattcataattttaaaaatcacaatctaaaactacaacccaataccaatgttctcttcatagactggtaaaagtgcaaaggggtgacaatatactgtgggttgtccagaaagagcactagcattgctggaagttgaggaatgcagggggtataatccctagaggtttttggcatatctatcaaaagtgtatgctttaacccaccaatcctacctctgaaaatttatcctccagatatgcttgcaaaatgaaatatgtacagaaatgttcattgcagaattatttgtaaatgggagttgcataagggtcaatgagggactagtgcaataaatgctgcaataaaatattatacagctatacaaaagaattagagcatatccccttatactgattggttaaactcttcaagtacattggtaagggaaaacaaaagcaaggtgcagaaaaatgtgtatgatactgtttttttgtgtgaacaaagaaacaatcatatatataaatatattatataaatatatatttatataatatataaaaatatatattatatttatataatgcatttatatattatatatttatattatgtatatatatatatttgaattagcctgtatggacatttttaaaacaactttgcagacacacataagaaacaaattaagtatctgtgatacatgtaactgatgaagagcttgccaagacataaatgtaacttctaaaactatataggaaaatgacagataatgcactgggaaaaaagtagacaaagatttttgaccagtctattcataaaagaggatatcaaacagccaataaatgtataaaagtgttcaacatcatgaataataatgcaaattaataccaggagaagctatcactatatgtccatcagctggccaaaattaaattttcttacaatagcaagggcactagggacttggatgcatgctggtagggtgaagattggtgtaaacacttggacaaaaccatgttatgaatatattttctattaaaggtgaacatacacgtgtgttatggctaagcaaccccaattccaggtatgcactgttggaaatatattctcctccaccctaggaaacaggcataagaatgctcttcttaacattattctcagtagcctcagaccagaaataacctaaattaaatatccaccagcagcaaaataaacacgactatacagtgttttttaaaaaaaaaaacaaaacagaaaatagcaagtgttggcaaggatgtagaaaaattagaacttttgtgcattgctggtgggaatgtaaaatggtccagctgctgtggaaaaaagtttatccattcctcaaaaagttaaacatagaatcatcatatgatccagtgttccatacctagatatatttgcaaaagaattgaaagcagggactctaacaaatacttgtatgccagtgttcctagcaaaactattcacaatcaacaaaaactggaaactcaaatgtccatcccagataaatggataagcaaaactatttagccttaaaaaagccatgaaagtctgatatttcctagaagacagatgaagcttggaaacattacactgagtgaagtaagccagtcacaacggacaaatattgtaggattaaaataggcatattcacaaagacagaaagtgagattacaagggactggggagaaggaagaatagggaattattatttaatgagcacagtgtttctgtatgggatgatgaaaaatgttttggaaatagtggtaatggttacacaacattgtgagtctacttaatgccactgaactgtatgcttaaaatggttaaaactgtaaattttgttacatgtactttaccataataaaaaaacaaattatagtatgttcatataaaatagtattatacagtgatggaaatgaatacactataaacgcactccacaggttgaatctctcaaatataatgttgagtgaagaaagtcatatacaaaataatacataaaattaattgtatgtaagttcacttacataaagggcacacaggcacaactaaactatgatgtatcgggatgcaactatcaggatgaagtaaaaagaaaagtaagaaaggaactgccctagaaggcaggttagtggttatctttggtgaggagcagatgaggcgtctttggggtgctggcagtgttccatctcttgatctgggtattcacttcataatgatttgtttagctgtacatttcttaatgcattttacatatgtgtgttacatatcacaataaaatgttatttaggcagggcatggtggctcacgcctgtaatcccaacactttcagaggctgaggcgggcggatcacctgaggtcaggagttcgagaccagcctggccaacatggtgaaaccccgtctctattaaaaatacaaaaattagctgggcttggtggcaggagcctgtaatcccagctacttgggaggctgaggcaggaggattgcttgaacctggaggcagaggttgcattgagcagaggtcacacaattgcactccaacctgggcaacaagagcgaaactctgtctcaaaaaaaaaaaaaaagttttttaaaaagaagtgaaaaaaggggttatgtgttgaggttggtaatacaagaactgcatggtgtgggcatgattctcttaactctactattttctatttgggtttttaactgtaaggcttatgtcatttaattttttcaattcaaataactaaaccagtaaactacaaaatgacctggatcaaatgactgcaagaaattttgattctacatatttaaacaatatagccttccaggaaatgtaaatacttgttttatataaatataaaaacaagtgtcttaaatataagtattgaatttgatttgtcttcagaatccaacattcagtactaagttccactttgaaaccctgttttttgacataggttattaaatattaagcatttaattattacaaattaaaaggaaaatataaaggaggatggatttgtttgtttctttttcagattgaaactgcttggccaaggcctagccagggtagctggcctacccatggcaaggacttgcagcaagccaaattaacttccttgtttggatcacacattaaatttcggaataaagccatttccctggaaaggatcaggaagcattaagcagtagtgctcaagaagattaaacttccatgttgagaatctcactggttatctttggccttctggatagctagttcttttctggcctgtgtacctttctatggctacataaaaaaattaataacctttctaaaagtaaaaatcctatttggagtaagatggcattgcaaattaaataagtattggaataaacaacattagcatatttttttcaaagctatgtgtttagcactcaaaacaatgtcatgttgggcatctataaaacagcttatcaacatttgcagttggcaaataggtgtgttttggagatgttatgagcccttcttttaaaatcactaagatttcttattagtgtaaagaaacatcatgtaagtaaacccagagctctttttaatacatttttttctgttttctcttgtgctactgttttatttttttaaaaccttcttaacatagatgtcatggactctgttcataattcagcagcaaagatcagatttttttttaagttcatagaaattgaagctgtttgtttactagatccccttaaactttgagactcatttttaccaataaatctttacacactaaagaacaacgatctatataaatagttcaattaggtagcctttctctctgctccttaatctgtttccaaagagactttgtaactttggcttagaacttgcatgaagatgttttctagtgttattttcttggtatggttgcattgccttttacttttttttggttttaaagtaacacataattcctgacacacttatcattcaacacataagtgcttctatttagatgtctactttcattttattttttaacattgtactgtaaaaagacaaaacatacctactacaacaacagggattgttctaaatgctgtctacctactaactcaattgtagggaggtttgattttccattttatttgtgtgcacttctaatatacttggcaactccctatcatattcattaaagaaaaaactttagataaactatcataggaaaatctaaactgaaatatttaaaaaaaaattttaaatcagccttatttatttacatgcatatacaaatacacacaaacatgttaaaatgctcaaattatccattttacattccatacctcataactattatatacatttagtattaccatgtactatatgtttgtatgtagtgcagtttatccaacagcataagtcataccttctgggaagatgaggtgtatgtcaagcattggtgttctactgcctgccagttttagtttttaataaaaacaagagaatcacaaagatgaaacagaagcaatccaaagtgtataaatcatgcttctttcccttatgatcctattcttgacttttattacctcattggaggacaaggttatacatctcactgttaatcctgggctaggtcacctgttgagtaaaagaaaagcctttggttctcagattttaagtcatctgacattttaaatttgcatttggagacaataaaggaatataaccaactttttctgtttctttagatcttgaaaaggaagttgtttgaagtcaattctttgttttgatgtttggtcaataatgaaataatcttcattttatgttatatccggcaaagaaaaacagtaacagcaatatggagccaggatgtaaatagattgtattgcttgaaatccacttgggtaaaaaataagcatgcaaagcaagggaaaataatcaatcaaaggggttggtagatgtttttcttggttgtggctttttgggtggctttttggactataagccaaagttggatcttgtcccaactgcttttaattaaactcctacttctttttcttttaatactattttttctcataaaattaataagggatcatggtaggacttttggaaagtatgagtattaattaggatatgggtctagctactctaacagacatccaagtgtcttatgattagagtttatttctactctgagataattaggcaagagctgacgtggttctccgtggtgttcaggactcctaacctggactccctccatattgttgctatgctgctgtcctccaacattgcttccacctcctgatctaagatggctgcttcagctccagacttcacagtcaccttccagtaagaaggagaacagaggaaaggatactctggacattcccagaagtgacacatattatctccatttaaaattcattagtctgtgctcagccacaacagaaaactgggaagtttcatcttaattctagttaatcctatgcccatgtaaaattggtggttctacagaaagaaaagaagactggttattgggagagagctagcaatctttcccagaatgcaaaaaagtataaagaagaaaataactattacccataaattcaaaacctaaagatactgttacctttaatttttggcatagttcatttcattactttactgcattacatatttttaaaaagaattatactatatattataatatgctttttctttttttaataataaatgctctaacattctaacagtctttaaaactttattttaatggctgcatagtatcatatacttataataaataaataaaataaatcaatcaataaataaaataaaaaaattatttttcagttctctaagatatgtaacttataggtcaaaatactcactttaaagtttttatttttcatattacctctcaaaaaggtggtgtaaaattatactcccacagtcatatttgagtactcactgcatcaaatatttctcactactaaatagtacaaattttaagatgattactcatttaatagttaacaaatggcctcttattgttttgatatctatttctttgtgaacaacatagaatctttgaaaaaacaattcttggtaatttgtctatctggtttaaattttctctatatgaccgttatctgtttttctacttataaatttatgaaaactctttcaataatatggatacaacttatctttaaccatggtgaaatattttcccaggtttgagttagtcttttctttcaatatttatattcttggaaatttgttctgttacaatatttagaataaatatttatttgtatctagtaagcaatcaataaatgttaatttaataagggattgaaagagtgaataattagatttattaccacattgtattactcttaatgcttactgctagtcttttcttcttttaactaggtctcccccttttggatgcttttcattttggttttcatcttgaatgactagaacatatattttagcaatacttttgagatgcatatatgcttcatatacacatgcatttcaaaatatccttctattgactttacccaaggacttgggtgattgtatagaattcattaatcctgttttccttcaaaactctgtataccttttcctaccttctggtatgtgacataacgtgtaagagtggcctgagttttatttctttgtaagaaattattggccaagcacagtggctcatgcctgtgatcccagagccttgggaggctgaggtaggaggatctcttgagtgcagaagttccagaccagcctagacaacatagcaagactctgtctctgcaaaaagaaaagaaaagaaattattgctcttttggttttatcgtcctggcagttctaaggtactttttctctcctcttgaaattgccccccaaaattagctcaatataatatgagtgcacattgataacatttcataacttcccctgggaatatcaagaattatattaaatagacagatctggaaatgtttccttccactttgcccttaattcttatttctcttgggtctgcttggcctcttcctctggaacatcagtttatactacttgagtttgcttttcatatatgttgtcttctttcttagtctaagaatctgtttgtcttttgtgcctcttcattctgggagaatttaaagggtttgttcctgtaccagtggtttgctttttctgatctgacatttatgtgctcgttttctaataaagattttaatattgttatggtatttttatttctcagtgttatgttagcctaccctgttcttgttttgtttctgcatgtgtctagctcctgttttatctcattctctggcatttttgtctcattgtttatagagttattgtttcaaggaattttattgatcctataaaccagatgcttcacttgtgtttgctctagtaaatattttcccaaatgtatgctccttctcttcgttttgcttttatatatatatatttctatacatataaatataaaatatttctaaatatatatatttatatctatatacatatacatcacagtatcttcagggctcaatcttttgaaatgtttttattccttttcatatttattcagaattgaacatagagactatgaagtaggccagatatttgaccataaacatgaaataatggtggctagattctagtatattttcacatccaatttttaatttttattttttaagaaccctatctcatctcttaacctggaagactggatattacagtcataggttcatgtggctggttcattgatccagacacttgaaggacatggccattttctgtgtttaactttctgtttggactggtctctgtatcaggtacatagtgtgaccatggatacatgaccctccttgagcagctacccacggcattattgaaatgaagctccaggtcaggaagatgagccatagtttacttgggtagctgcttcataagatagagcaacctactcctatggccttcacacctgtacccaccagtgcggggtttgtaggatactgtgagcattgtcatgtaatcatgctgtgtttatttctcaagtgagaggcttccaagatagttcctggtgtttcccttcaaacaatttctcttctcactaatatttagctaaatatttatgtttctcaaatattgatggtattttttcagggctggatacattagtcctttcatatagtagtccattggtcattttataaggaatccaagaagcatagcataagagaaaaggataaattttcatcctggcacagtggctcatgcctgtgatcccagcactttgggaggccaaggcaggcagatcacctgaggtcaggagttcgagaccagcctggccagcatggctaaaccccgtctctacaaaaatacaaagatttgccgggcgtggtagcatatgcctgtagtcccagctactcaggaggctgaggtaggagaatcgcttgaaccctgaaggcagaggttgcagtgagccaagatggtgccactgcactccagtctgggtgacagagtgtaactccatatcaaaagaaaaagaaaaggtacattttctcagcaccaagtttacgtgaatgccattaacttagcctgtttactgccctgattcctgatttctcatattatgtaatgatatttccatgttattcaatatactgacaaaaattattttatattactatttcatcatagaagcaatatatacatactcccagaagtatttgaaccagaagataatggactgttggccagtagagcagatctgggcacgggacccacagcatccagtacattaatcctttacagttccttccatgtgaattgtctgagtgtgctctttgtccattcctccttttgttaattaatttttaacaattcaacagttattgtctactatatgttagagctcttgaatctttctaagcgctgtccttcaatgaaacacagggatttatttgccagttccttatattaaagagaggatctccttatagtagctgctatataatagtctcttgtctgctttatttttaatataatactttctcagtttcctgttctccttgtaagtaagtatcatggttttggcctggacagggtgaaaattctcatactgtagaaattatcagtggacttttgtctatacttcttccatttgctttgtatatagtaagaccagccaaggatataaattctcatatccaaatttttcatctaatattttaatatttaactttttaatccaacaggattttatgttgaattttttgtgataagagagatttaaaggaatgtactttcctcagaaaacaagacaaattctacagtggtgtctattaaatatttcctacctattcatgtgtgactctttactctatatcccaaaacaatctcacctcagtataagtaaacttagtccatatttatgtttatgtataaatatatttaatatttaatagtgtgttatatatgatgttgtagtagcctgtgatataatatatacatgtacattgattttttatatatttagcacagtgtttctgggatcacgaatatttaataatataaaatttgtgattagaataaagaagaggataagatgtcaccagcttattgatggtaactgccacccccaatacctcatcttgtccccaggaggcttgctaaggcatgtggaggaggaatggagagccagatggtgcctgtggctccatgtagatgattcctacagggctggaaagcaattactcagtaccagtcccctgggaggctgccgacaaggcaggcatgttccccgcattcatctttacaaggtgtaataattaagccagcagaatcatagcattgcctgatggatgtacaaagaatcagcatggaccctcttggcttgttcattacctcaacgtcacctacacaaactagtaattactcacggaatttatggcatttacatgtgacaatgatctttgctgcattaacgcctcctaaagctaaggtccatggggccagttaaaaacctatttattaccaatgaagcttaagcattgaggatttgggtagattttactgacattacacttagagaaagattttagatgtcttcatcaagaagaagacaaagatgtgtgttggacgcagccattttgaatatatttggcagcagcttattaaatgccctagagttagcctgtttaactctgctttaaacaagcacttgacatgtgctaaaccaaagaacttctctatctgaggtgtaactgtctattatatttcttccactgacttaggctagttgcagaggaccctccaatcggtacattggaaattcttggctgaacttgaaggctgtgttttaggtctgcccttctctatcttgcgtttctatccagatgccaatatgaactaaaatagagcttcttgttagtcagcttcttgtccttgaggggcctggaggctacaaaaaaatgagaagtagccattcatcttgatatctggaactcttgccctgggaggctgtcaaagaaagaaaattctggaaagaagaggagaagttactattttttgtcagacggtctagaagcagagcttgagatggagattctgatgcaagtgatttttggagggaatgctctctggagaaagagagtgagaaagaaaaatagggtaggattagaaataaagtaaaggtgggacagaaggtctagcctcaacctggtcccacagggagctttggggtaggaattgcaccacagagctgtcctgcagaatgtcatggactaccagcagcctacctctcccagaggtgcatgcataaacttccaggcatcttcggccagggtggtactcctcagccaacaacagtccttcagagaacggtagaggtgccagctgttagcagctgacaccttcagcatctgcaggatgggtgcaatggccccgtgaagggaacctgagtggggcacggaagtactaactacagttactgatccaccttcctctttcttgcctccaacagtcactctattactctgttatgtatagtcatagcatttatcactatctggaaatagcaggtatatttatatatttactgcttattatctgtctcctttccactagataccataagctccagagcacatcagtgttgtatcatcagtttctaaacaagtgccaggcacatagttaggtaccggggacacaatttgttgaatgagtaggggcgggatgaggtaggaactttggaaatctgtgtcatgcccaactgtagtggatgctatcagtgtcccatccagatcacctcagatcctggctttttcaacccgggttcccattctccagcttctgcatgcttcactcctaacaagtgtcgtctgcttattagtgtgtgctttattagttgagatagtaatagctagaattgattgagtgctttcagcctgtctaacactgctttaaacaagcacttgacatggactaaagcagtgcttctcaggctttaatgtgcacacaagtcccctgtggatcttgttaaaatgcagactctttcagtgggtctgatgagggacctgaggaactgcatttccactgagactcccgggaaagctgatgctgctggtctccagaccacactaagagtggcaagggatttgttcattaatcttcataacagctcggtgaaataggttctattattatttccattttacagatgaggaaattgaggcagagagaggttaagccatgtgctcaaaatgacacagctggcaagagatggaagcagaatttgaatccaggcagcctgaatcccaaatgtgtcacctgaaatactctgaataaaggcctctattgaaagatgaagttataagtcaggttgaccaggctaacaagtaaagacaatgcatccctctggtggatctcacagtgaataaagtctatacactgccccaggacactcggaatcttgaacgagcatgactcaatgggagactgttccactgtcagtttctcttccagcctcccatgactccaaaccattaggctgcagttttgacagtgtttcccaatggcttgaaagtaactaatgagtgagtgccagtgcctaatagaggtggatgatggcagttataatttctcaaagatcatttgattcatcttttgtaatatttcaacatttaatataaaacagcaggcaactggagatttataacttgattcattctaattgatttcttggcttccttgggtctaattaatttttactgtgtaccctaaaatggtgcaataggcttcctgaaagctgttagaaggcagctgtatcatagtttataaaaagctgaaacttggcttttatttgataggtaaatagaaattgattttgcttttgaggtccagacataaaagagaaaaattgactccagaactcaagagaagatcctggattactctgtcttggtttgggttcccccaggaggagattccgagacaaggactctgaatgcaagtagttttctggaaggtcgtgccaggaaacctgccaagaatgggaaagtgagacagggagaggaggaagccaaataggggatgcattgtcaaataagtcatattatgggcagctggtgttcaatctatggagttgtctaggagacagcacaggttcacacttaggttttattccaaccaggaacaagtcaccaatcacatcagtcctgggttgagggctactttttcacattaactccaagcattctggacataggcctggctggttttgacagccagagaaaactctccatcaaagagatgaaagcgcttgcacttgaagctgtagggttgggtctacctgggaataataaatggcaaggggatatagacagagaacacagtgtctgttacaatgtccaaatataaactgtgctgctttgaccttttgtgcaccagtgacttctccccagttcccagccgcttgcccctgaccttgtgtagagcccataatcaagattcctgtgccactgacttgaagacctttaactaaggcagttgtccatcttacattttataatacaacactgtatcaccatttggaagaacataaattataactataaattatataaattataagttacaactattgacaagattgtgcatagtgtaaagtgctttgggattttattcatcagtgctcagaatagacctcatggtgacttggcttttagtggaccctccagtaacaatctttttgtgaaaaaaaaaaaaaagaaatgagaaaagaaatgccccatcaaactgaaaattgagtagaagcttctgtgttgcagtaattttttgtgggcttaagatttaatcttgaaaatgcaacatttgtgtttagcattgtcaaaggcaaaagaggaataaaatagtgccttccaggtcaatgaaaaataaatccagctcctgatcaggctctgctgcttgcagggtgttgttctctgagtgttctgattggcacaacacaggctttcttgccacctcccaggcccagctgctgtttgcccacctgtgagccttattcctgcccaaaacaaggaaaacagcaaaaacagtggggccactgaaactgggctcaaggtccaagaacagctttccctttgggttctgttattgccaccatgaagctacttgtggaagcccaggagcaactagttattaatctgttcctctcaactatttctttaggaatcatgtgagtgtatagacactacagacaacgaggatgatttcaaaaccaaaccatgatttatttgttgatatttggaaatgtacattcaacttcttgtgttttgttacacaactcgatggcacattttcatttttgttttagtttaattaacaaagggtgtgctcaccgtgtgccagaccataccagcacttggcaaattaaactcatctagtcttcataacttcaccatggtgtaggtactgtctttattcccattttacagatggggaagttgaagcactgagaaattgtcatggtggtattatcatgaaaataacattaagattgatgaaatgtatatattaactaattttgactcacaggttaatccttctgcccttccctgatcctatcccagatggcttttggaatgctttccaatacatattaaagggtttatctgtgctatctctggaatgttgcccaggctctgttatagtgaagggtaggttataaagtcagcacatagtggagaaaatgccatagagtccaaattaactctgaaaatgctttcaaatacctcaaagtactgcagtgtggttttatgcttatgaccctctgtggtaattctaagggagctaaagttctagaaaaactgagcctgactgaagaaagaaactttcaaatcactcagcttttaagataactctagggtcgaatggggattggatgaatcaatcaaaaagcttctgcttgcctgcaaagttgattcctttctagttacacatcaagattctttaatctcaatgtctggtaataggcttatttgttaccttaaacatatttgttcaagcacagttgtgctttttagtgaaatgtaaccaattgcttaagaaaagggtctcaagaagtagaaggcctgagtttgattcccagactcttcatagatatttagcaatgacaaattacataaagtatttgaccttcagtttgttcatgtttaaaatgggtgcataatctgtacctaaccttataggttcagtgtgaggactaattcccatgaagctctttgaagggtgcctggcacttagtaagggtgcttgaaatgtcaactcttcctgttattctaaagtcaggaggaaatttaaagaatcggttatgagattcagctgtaccatattgtcctgcataatgctataattatgaattgacttaaaaggggcctggttccattacttacaagcttgtgacattaatcaagttactcaactcctatggctcaatgtccacaactacaaaaagaggtttttaatgttacatttcttataacattattgtgagcattaagttaattaacatatgtaaaactccttggacaatgtctgggtttttaaatctgttaccactgctgtacccagaacgtagcacatagtaggtccttttgttaagtgggtgaatacactatcagtagccatagtaggaagagcttatcactttaaagtgttatgttttgattgacactgtggttgcaaaaacatggtttttggtcacagtgtgatttgatgtcatatgtggtcacattcattaatgtcaccactgatctcttaaaaaaaagtctgtaaatattgagaagcccatcaagctcacagtggtggatacaagcttcccaaaattctaagttttgcttggtagcttgcattttattattggcaacacatactgtcagttatttaccttgatagacccactttattcattttcaagaaaatatctgtcacatatccaagtctgaataaccctagttttcctgtcattctttcaagtaaaaatggtgttacttgggaagaatgactggttcagcttaaaactcagtctcctaagtgtttcagtataccggagaattattttatgtatagttctcattttgtcatacagaacatttgaaaagccacaaagagtaaaaaaatttaacaaaattaataacttttagcacttcaaggatgacattcttgaagtgtgtttttaacagtgagtgtgtagaatgaataatcaaatgatttctggtacactggaagtctggtgccattgtcttgatttgtatgaagacataagcagttttttttttagcattgcttttgtataaagtgcagatttcatctcagtgaaaaaggcaataacctcttaatatcattatgaaattattttgacctcagggaccctcaaagggtcttggggaaccccagagatctgtgtactatgctttgagaatcacttagctacggaaacattcagtagataaaactggccagtgaaagggatagcagagtcaaggatgacaccatttcccattctaagaaagtgagtgggcacagatgccattgcagagaagtaagggactagagaaagggcgggtctgtggcagaaaagataggttcgtgttggtcatgaggcatctagaagatctatttgagttgcacatcttgggacgtcttgtgcaattgttcattcaagaaagattaatagaacatccactgtgtgctggaaatgagaggaatgtttttcattcccaacctttttaatgcagaagtcattttcttagtgaaattgtaagcttctttagaggatgacctaaattatatatttagaaaaaaaattgtatgaacctaacacaatgcaagacattgacaaaatatcccagtttacaaaaaatgatattctccttcctgacttcccacaatgacatacagtttttcttccaccctttatccaggtcagacagtagacacagtcattctaaacttcatcattaatcacgaaaatgcaaattaatatcacagtgagatattgtatatacccaataaactggtgaaaatttaaaaatctgacattaccaaaagttgaggataaagtgggtcattagggatatgaaacataccctatgactcagtgtatgtacacacaatttatatgcatatatatacacatacttacacatatgtgtgcatgtatatatttatacatatttatacatgtgcatgcatgtatatgtgtgtatatctacatgtctatatgtatatgtatctaagtataaaattgaaggtaagatgaccctggactaatcttccaactagcagagcacaagcactcctgataagatggccttatcagaagtgcttgttctctgctagttggaagattaaattgacaccaccatttagaaaacaatttcacacaatcctgtacaattagacattacactccctataatccagaaaatccacttttagggatataccctgccaaaagcctagcacaagtttaccaagggatctgcacaagaatgatgatagtaatatgttaataatgtcaacttaaatgaccatcgataggaaaataactagtggtatagtcccacactggaatattacactgtggtaaaaaatgaatgaactactgctacatgcagcaacatcttgaaatcttagaaatataagccttaaagataaaagaaaaatgcaaaagactacgtgcagtatgatacattatgttcaaagcaaacataactttaaacatattatagtggataatacctgttggataaaactatacaatgaaacaggactacatttaacacagaattttaacaaggtgttttctcctggtgggtgtgtagacaaaacgatgtgatacaggaagaatatataggtcaaggcaatgatataggtaaccttctatgttttaaattgggaggtagataaattggtttttattataatgacagaatacacacaaatgtgtgatacacatattgctgagtatttttatatttataacaaaataatattaaaatatgataggaggaaaggtttctttggtaagcctttaaaattttgtaactttcatgttttacacatgtattgtaaatatgaatttttctgcatgtctcctaataaattatgagagtttccagggcaaaaatcttatttcagtcatgtttacatcttgccttaaaacaaaagaatttctaggctctattatggaccaaatctatgtttgctaaccaaaaagaattaatcaaaataaataaataaataaaagctgctttctagattgatctatagccaaaataattcactgatgttttcacttatgtacttgccaaaggatattagctatcatttggcatttagtctctctctatatatatatcctcttttttattattttatttttgagacagagtctctgtcacccaggctgaagtgcagtggcacaatcatacctcactgtagttttgacctcccgaactcaagtgatcctcccacctcagcctcccgagtagatgggactacagttgcacaccaccacgcctggctgatttttttctatttttttgtagaaatggggtctgactttgttgcctaggctagtctcaaattcctgggttcaagcaatcctcccacctctacctcctccaagtttacttatttttaacaggagaaagattactgaaccaattttgactaagtttatggggtgagttcgtctcaaccaaatactacagaggattgaaatctatattaagatagtcactgcaattattttcatgttaagaccagatatcagaacatttttaaaacgaatatgtggtgttctgtcagtaattagccattgaatatgtcaagttaatcacctaattatgtcttgctgtagaaagacatacatgagaaacttacaagcctgttttgtacaacgttgtgtcttaaacactgtgtgtgatccatctgtcctctgaaattacttggagtcacctcccatcacccgtcagtgttctttcaggaatcatacagattaatagagtcctcacttccgtgctgtgctctgaacctttttaactttaatttagtcctgacagtggggaacaaggacaagtatatgccctccaagaacccgagagctctctacattttgtctagctgaggtaataaccatgtttattggcctaggcaatgtcttttaggtcccttttcccattaactttgtagttgtgaacagttgtcttgaggttaggaggaaaggtgatttaaggaaaaagaaggagcagagggatggaatgtgtacatagccctttctttctgaattatgtctccttgtttggcattccttcctctgggtgttttgtttcattggctgtggttgagcccagcctttattgatccccctgtcccaccagcactgtgtgatgtaaatgcaaatgtctggagtcatcggggatgcttcataaagtgtggagcagacctagagaaaggttatgaaaatgtacaatgcttttccatcgttgtagcttcatgcagacattatatatcatgaaatgaccatatgtttgagtaaccatttatatggaagatgagagagtttgaaagttcatttttttgatacaaagtattttctactcagtcgcagccttttctatctcagtatatcatcatttatcttgctttgaatgaacttgagtacatatagttgtgtgtatatgtatatatatacacacacatgcaaacacatgcatacacacacacctatatatacatctgtatagatgtatgtatatgtacatgtacacacaatatatatgcatacatatatacatgcatactcctgtatgtgcatatgcatgtatacatgcatgtatatatttatacatatgcatgtatatctatatgtgtatatctatatgtgtatgtttataagtataaaatgtacgtataaaattgcggataagatggacctagtatgcgactataccacttgtgtttcttttccatattgaaaattgtcaatctttccccatttctgtagaaaaaatgaatttacactcaaaaaagttgattagccatgttaatagtaataatgttcaatatctggaaattagctgagtacatcgatatacaaattagtcaatacaaaagtagtatatgaaaaagccactaaataacatggcctctttgtttattgataaaaaattccaaaagggaagtggagaaaatggagaaaggcaattgaatgccaagtaataatcgttataaccactgaggggtggctgagagtggatagtattgattggcaaaagaaagctttcttgggattctgaggatatcagtatcattaatgcacaaccactgagaaggattttaaaaggtgaggcatagacatcactgttagaaataacagcagggcattttttcaggaagctctggccatttggtcagtcaagagctattaatttcagtgaattctgcctgcataatatgtgcagcccctagagaggccaccttcaattctaaacctcaacattcatttgctgtcttaccaccttagtagatttctttttgggtttttttttttttttgccaaaatcttcactgcatgattttgcaggctcacatgcttcttgtttgccattttaaatcacagtccccatcaaatgcccattatctttaataaggtgaagcaagaggctgggtgcttggctcacatctgtaatcccaacactctgggaggcctagcaggaggattgcttgagctcgggagttcaagaccagcctgaacaacatagtgagaccctgtttctaccaaaaataattaaaatatacagatatagtggtgcacatgggtggtcccatctacttggatggctgaggtaggaggatcgcttgagtcttggaggtcaaggctgcagtgagccatgatcacaccactgcactccatactgtgtgacagagcaagactatgtctcaaaaaaaaaaaaaaaagatgcaagaacttgaatcaagaatataaagctctgcgtctgcaccacaagagacaagagtaattggtagagtttgtgttatcctttaaagagtgcttgtgactagcagatgctgagagaaaaaccaacatatttttcttgttcctcaagctactcattattatcttgataatatttctaatatttatttttttaaactgacatgctttaaagtaaatatactgaaaaaaaccttattcactgactgaactaagtattccatttagaagtgtggaattggggctttttttttttttcctcaacatgtaatgagtcagtgtggaatattgattattcatctgaatatttaaatcttgttttgtttttggttttgtttgcatgtgggttttcttggctcagaaaaataaataattgcatgtaaaaaccatttattctttaatttcagaagtatttattcagcatttcttctattcaaatctctgatggtattacatagcacacaggaattcaaatgcagcagagcatctaaaacataaccaaacagatgtgtggggcatgtgttatgctaataggaaaggctatgcacagcatcactttaaccataaacacgctccattaagattatagacatagacaggtaggtattaggttggtgcaaaagtaattgcaattacttttgaaccaacttataggtaggtagatagacagactagattcattcattcatttattcattcatttttctgaagaagtagcaaaagagagactgcaaaactttctaaaatcctctagaggcaaagccaacacattatagcacctgtacttcccatgctgcatcacacaccaaatgtcttttcttgctggagtggccccatgtctttctgctggaattcagtttagactctcttagtctgttctctctatccattatcctgaccaacatataaaggtgtataagccaagctgcccaataattatgctgtaaaacagtggttttgagtactttctttctttgtgtttttgatgaatgcacaataaaatctacatttttgtcattttgccttggaatacaagtaaccatctcacacacacacacacgtagacacacacacaactttcaggcccaggcactctcccattctcaatcaacagtcttgcctcaagggcatatcattcaatctcatggatggaaacatacctgctgtccactcccaaattcacgtcactgtttcttccatatgccccttttgagtttaaggctgtctgtctgacatttccacttacatgtttctcatgcaccctgatttctcaactgcaactgaattcttaattttcatatacctccaaaacggctgttcctcaatctttcctttttagtaaattcgttagctatcaacttagttgcccaaactggatgtcaaggagtctctctgggtaccccttaggttctcatcttctatgcaatctatcaccaccacgtcctgttgatttaatgtccaaaatacatctaaaatccacccacttctctccattttcactttttctcaaggctcaaggacttactcttgcttaacttggctcactgctcctcagggcgcagctataatgttgccttatgtatcagctatctcttgtcacaataatgttgtgtagcaacaacaaaacctcactggcataaaacacaacagtaggcatttgtcacatttgagtgggtggggttcaccttgatgactctactgaccttggctgagctcactcacatgtctggggatcatcgagctgctggctgacttaggatggcttcagctaagaagactgggatgactcagttctgctccatgtgtctcatcctcccataggctagctagggaatgttctcgtgggaatgacagaggcacaacagcacaagtagagatatcaagtacgagtatttgttcaatgctctggtgtgttacatcttctaatattccattggcggaaacaaatcacatttcttagcttgtgatcaaggggcagagaattagactttgcttcctgaatggagatctgttagttccataataaggacggggatatagagaggatgatgaattaggatgattaaagccataaatccaccacgctaggtcagaaaggcctttctccccaaattagagtctcacctctctcccatttatactctctcacagcaccctttctatgactccatagccatttgtttggaagtggtttttttttattattattatactttaagttttagggtacatgtgcacaatgtgcaggtttgttacatacgtatacatgtgccatgttggtgtgctgcacccattaactcgtcatttagcattaggtatgttatttttaaagaactatgtactacccaaacttgtaagcctcatgagagcccagagaaaggagctcccttttgtttattcactcacagagcctagcacaatgcctggtacattgttaagtgttcagtaaatgtggagtggaagacaggaatggattggcagtggaattctcaaggtgcagatgatatatcctcactatagccccaggctagagtgctgcttacacctgcaggtaaagataaggacttcagctaataaattggccctcctactacaaggcctctggtttcattgagccttttgggaaatgtaccagttcccgaggctgtgattgtgatgtacttctcaccctggaccagagtcagggcaggagtcagttctacaatgctgcattacggagagccttgcctgcctatttctgctggttacaattccattattacaggacccagtcaaagcagctggagaaactctactgtatccctgaaaattcagctgtcctttgaggagtgtaacctaagacaatgtgtactctggtaatgccatgttctgcaatatcttccatgccaaggttggcatttttgttagtaatactttcttatagtgcaaagaaaagaagctgcttttaaagagctgaatttggcacctcataatttaatagtcaaatcatttgctgtctattttcaagggttttcaggggaatttaagaaccaggaaggactgaaagatccataatactttctttttctagcaaattattaatgcaaacagcattagtacaattgaatacaattgcaaggaatcaaggggattataaatccaatgagagaaaaggcagccagaatgctaagagagccaccacccactgctccaccatgacccgccattccacgtcccatgctatcctccacacactagacacatgcaactcctgctgccactgggttgtgatccccattgtccttctggtcatgctgtttctaccgtctggaataccctcccccacctttcctgacagcccaggctctactcaacatctaggcactaggtataaatttaaaatgtgcaaatgctttgacccagtacatttgctttgaaggatttatcctcgggaaataattggagttgtgccttgagtttgcacggcaatatgccaggacatttgcagtatttacgtcatctccaggagttaggatctggtggtcaagaatgtggctttggcatcagactgccttgattcaagtcttgccttcaccatttgctggttctgtgactttggacaaatcatttaatccttttgcctcaactgcttcatacctaagatagaattgatatcggcaactaactcctaggtttactgggaagagtaaaagtgtcagtaaatgtgaaatactttgaacagtgcatggtgctcagtaagaactcagtacatgtaagcacctatgctttcaaatggactctcattcgttgagaatttttcttcattttcttgctgtagttgctattagtggaacggttagaaccttctctttgtattctttgcaagctttaacctactgttttagatatatttgatcttcagtgaacagttgttagtatgtcaagaaaagtaatgaaggttcttaaactaaacttaattttttatggaggaacacaaggcaatttgctaattcggggatctacttctctttcatgatagcatctgcagatgtcatgacagtttttcaagaccctggcaacttgataatgtggcccaaatagggggccaatttcattctgctatgagtccaatttaaacaggctcgattgcgtcaaaattagacttttaattatactttatctaatgtcaggaatcagtgttgtgctttagctatttaaaactttggctttcaattagaaatttgatagcaatgcattgaatgcatctcttcatcatgttttcagaatttaaatatctaacttttttcttctttgattaaagaggattccaatcattgctgcttgtatacaatgtaagttacatacgctaatgcctcttcagttttttaatttttttaattttattttttaacataccccttcatttatctatatacaaattgtgtcagaagacaaaattatttctgtgtttttcaaataaaaaatagggtcccttttatttttcaaggaatgatcttctttattaaatattatattataccacaatataacatctagacattgggagggatctttgaagatggtggaagacagtcttgatataataagattgaagatgaaaataggctaatagaattgcaaccgattatactgggtgtacccactgctatgctgtgaggtagggatcaatgacaaagctttgtgtacttccagagattggaaatatctatacaaagagaggtaaggagtagcctttccttgtaaaagtagaattgattccatattatatatcctctgtatgtccccgaaatagaaggtctgctcccatgagcagcttctcagaacataagaagagcatctgggctgaaaaaatgtttcttgtttcctccttgttacctattctttgtatagatccggggtttcaacgtaaaggtcatgattttatctcctcagtcatttgttgctgggcacaatttgcctttatggcaagtgttgttgctagttcttaaaactaccagaagagatacttaccctcctgagcagacagaagctcaggagtgccacaaagatgaatatagattttaaaagaaatttaggtaagaaactagggaagtgataaatcatggccccctgttaaacagaaaactcattaactggaatactgcgttctagttaagtgacattttactatccttttttgtacatagagcattacttctttaataaaaggattacagaagcacaatataaagagggtaatttaaaaatctctaaacagtgaaaatactactttttacgctttgaaatggctttttatgtccagtccgagtgacacttttcttccttagtaaaatcagcaggcacttccaggtggctgaaatccaccctgtgcattgttgctgagaacatttatagcacattgttcagattagaatagctgagaacgacagggggctcttcaaatgtgcctcatcgagtcccaaattggagatgtgtttttgtcatttcaaagttttggcagtagggtctaggattcaaagcaaacaccagctcctgcagaacacaagccttaattaatttccagcaggaaatgagtgattgccaataagccatgaattaaaatggaatggttcaccaaaaaccaggtcctcatctcaaatgaatagcatttcttgctgttttcttgaaagatcatctcagactaagaagtgagcaagctcctatgacagctctctgtctgtaagggggtagttggtatggacaaacaccaaacagtaagtcctggcccagtaaaaaatggggaccaaatctgatggactcaagggcattttgtcagtatctctatcatgtagcctgcaatttttatggagaatctgtctatttttctggcttcattatttatcatgttgtcattaagattcagtcttgagaaggtccttaaaggtcagctgttttcatcattcagtcagtgcttacagtacactggggctacttctgccaaaggggtgtccagttgctgcttgaactcctcttgtggccagaaactacccccttctaagagaagcctgtttcatctctgagcagctcagccagttttcattttttcttaaaattgagcaaaaacgaatcccctgttgcttaaatccattgagcctggtttatccctgagggccaaacacaatgaatcaaaaaccttcttctgcttgatagctctttaataaaaggggaaggcaggtctcacactccccctgaggggcctcttctgtggacaaacatctctgagcttttcctatcttctttgagagtgctttgtgtgtgtgtgtgtgggtgtgtccacttgctcttatgtaaattctaattactattgtaataataaatagccaatacatacagaatgcttccagtgggccaggcagtgttctaagtgctcccataatcctcacaacaactgtatgaactggttactaggattatcccattttacagagaaaaaatgaggcacagagagattaagaaacttgctcaccaggatctgaatccactattccacactcttaaccccagcactataaagtttctcatgtcctcatttgtctatttcagccatacctgtcctggagacaagagccattgctagttttctatggggaactgacattgctatcatctactccacactggctatatgctaggaactatagattagttggtctgattaatcctttgaacagtcagcaatcattgtttttgaggatgtgttgttgttattgttgtttggtccagcacttccccatactatccccattaatcattaattatgttgttaattaagaacacctgtacttaactcgtggccatttattccttttctagaactatttattgtctatattttagagaaccttaaatatgaaaatggttaatccagaattttttgcttgggccaagcaagcaaaatgcattgctgctttatgaagaagaccttcttttggtaagaagacagtttttcatattttcatagccagcaattaaaaccacatgagacaggaaaaccttcaaattctttctgagcaaaatactcttcctagtgagaaatgtgctcaaagtggttaaagataatgggaagcagcagaattaggatttgaactcgtgtgcttctgggccaaaaccatggagttcccattttgcaaacacaccttggggtctgtaaccaggtgcggctccctgcaggtgccaaccacctgtggtaaaggcatgatgagtccacttcctgtaaggctcagccctgctagtcgcgactagcgccctctagtggtccaagagaaagggtaaggtgagttccggtttatgatttgacttgaggcattcggaggctaaacatccacaaggttagttccctgaacccctataaaccttgctatttatatctcttcctcaactctgaggccctcaccctacatcggctgcagtacagattcagcctttagcgacggaattatgtactgaaacactcatttctgtgccgctgcagtggttagctttgatttttatagagatgcacatgagaaaacagtctgagcctggagagtgacttgtgggctgctaaggtaaattgaacccatgtgtgtggtatcctcatgattgggagcagcagcagatggtgggctaggatgcctccagaaatgggcttcggaagcataaaataaggacttgttctcttacatctgcctctgttggggtgtttaaagaattgttgggattaatgcatttttcatttgaagtttaaacactctcagaggatgtttagccgatggactattctcattatagaatgaattgcttcactgggttgcactttgcaaagattggctgcagggagtaagtgatttgttggaaaagaaggagcaaaaaagggtggaaagagcaaagactcagtgtctcagacaagtcttcaacttttcctctccatccaaaatgaattcattatgactgagaggttccagttggactcctggagacatttagaagtgccccagaaatgccacctgcaggtcagtggtcatgtcaaactagaatcttctgcacaagtcaaatataagaaggaaacttgtttcatttgagtcagatttacttaagttttggattgactcctagatcggcttctcactttgggcaagctccttaatgtctgcaatccttgttattttcatctgtaaagtggagcttgtgatgcttactttgtgagatgtctttggaatcaagcgaagtaatgtctgtaatgcgaatagcctagtgcaggcatacaacagatgccccatctaatgggattatattaaaattattgttgttttaatattggttatgaaaatattgcaaagtgaatgaagaactctccttttacccaatttttttgttcaattttgtacgtgaacagtttaaggaatcttttaacggaatttttaaaaacacttggaggcggtgactctttaaaagctaaaccatgaaatgttaccatcagaaaagagctgctgctgccatttacaagcattaaccaaatcctcaagaattaagctagaactgagcacattcttaacaaggtggtttcgagttttcagatacatctttatttcttcagctcatttgcaaatacttatctctgatttaaatcattcaaatgacttcaggaacacaatggaagcagagcagaactaagtgtttccaactgtcaggtctggtgagggatgatgtaaaacgggacatttagctggcatcctgcatagtctttaaatagaattaacaaaagcttccacgtttcaatggctaaaggtagtgtttattgtaaaggcagcatgcctggagacctaagagtgggagtaggggggtgggcatgggcacgtgtgggtgcaggcagggcattctgaggggtcagttgaaaggctctgtctctggattcagctttaactggttctaaaataatgaagcagaaatgactttccttctctctctggtgtcagcttcaaatgaattatggatactgaacctacagaggtaatgctgattaaataattgaacaatccattgattaactacagattgtcaattggaataatctgtcgacgacctgactgcccacctttagcatttagacagtattttaatgttaatgaggttttgaactttttgtgcttttggtttggtgggggttttttttgttagtttttgagggtttttggtgggttttttatttttggttcagcacttccccacctaatcccaattaatcattaattatgttgttagttaagaacactgggctgggcacggtggctcacacctgtaatcccagcactttgggaggccgaggtgggtggatcacctgaggtcaggtgttcgagaccagcctggtccaacatggtaaaaccctgtctctactaaaaatacaaaaattagccgggcatagtggcacgcgcctgtaatcccagctactcgggaggctgaagcaggagaattgcttgaacctgggaggcagatgttgacagtgagctaagatagtgtcactgcactccagcctgggcaacagagcaagactccatctcaaaacaaacaaacaaacaaacaaaacaaaaacacctatacttgacttgtggctgtttattccttttctagagctatttgttgtctgcattatagagaactttaaatatcaaagtagttattcctgaactttttacttgagtcaaataaacaaaatgcattgctgctttgtgctttatgcagaagaccttctcctggtaaggagacagtttttcatattatagccagcaattaaaaccacatgagataggaagaccttattctaattctttctgagcaaaatacttgcccttaatttattatttaataaacacatatatagcacttaccatctgccaaattatttatattcttttaaatattaaccaatttaatcttcatagggactttctgagtaaagaactatgaatgttcagccgggcgcagtggctcatgcctgtaatcccagcacttcgggaggccaaggtgagcggatcacctgaggtcaggagttcgagaccagcctggccaacatggtgaaaccctctctctaataaaaacacaaaaattagctgggcacggtggcaggtgcctgtaatcccagctactcgggaggctgaggtaggagaatcacttgagcctgggaggcaaaggttgcagtgagccgagaccgtgccactgcgctgcagtctgggcaacagagcgagattccgtatatcaaaaaaaaaaaaaaaaaaaaaaaggacaactatgaatgttcctgttttacagatgagaaaactgaaatacatggaggctacataacttgtcagagatcactagtaagtggaagaggtgggatttggacccaggtagcgtccatagcttaatcagtgctctctcagtactttttggtcataactcttaaataagtgtaataataataaaaaataataataatgtctgccattcatagcattgtacttcttctgcctttgtagtgtagttcattttgaatcccagatagggactcatagatttttttctttttaatatttaaaaaatctcagatttgttgacttaaaatccatatagttttttttttaaatgtggacctagaactgagtattattgggggaaaaaaaacattgtaaattagtaagtagtgtggttcatgggatcatcaactgttagcgctgggaggaatagtatttttctgacccattttattttgggaatgaagaatctgaggtgggagaatctctggttttatacaacagtaggttgcccatggctttctttctgaggagactgggggagacacttggataagagaaggacttctgtgaacaagggggtatgcttttctaaaaatgatttgattaatccttgaaaatatccttctacgaggcacagagggaaatcctccctacccccgaataatgcacaagaccttactggtctacaaaggtcctgcagatagaactaaggacaagagaattcctatgccgctgtaatggcctacataggaaaagcattcttcttgttgttgaataagaaaacataacatcctccagatttctaccagtgtttttcttatgactggaaatagtaagtagaacaatgtcatacttggacaactatattcaaactggctaatagttttgttaattgggactacaaatgagaaatagaagtcccatgatgacctagtccattgaagtgtcaagtttaagtctcctagttcagaatcaaagggagcagctatagggtgagaagcaatcgcgtccataattccgttgacagcagttttcttcgggctttgattcatagctcatctgctccctgctgattgccctgagctcagcaatgccatgctggtttccatggtgctgatttgcataccaaaccaggacttgtatttttgtgtttgcctcacacatttccagtgctaagtgttcttctaagaaagggattagcacgctagccaattaagggagtttgccagaaataaagcacccagggaatttttcttcaggttatatattgctactgctatgcctaagtactgatatggttgattggttttcttaggtcagcaatgagtcttaaagataaaatttctactgtgtaatctttagtgttttcttttttttttcaactatcttttaatcagtttcaaacatttcagtgattaaaagagagatttgttgtggttttgttgtggagcagaaatggatttcaaggagtttaccttcagagcttttgtttttgttacggtgggtctctctagtggaaaaaaaatttccccatccctttggaaatattttctttaaaggaaatcatgtttttaaaacaaattatcgaaatcagctttctaatcaatttgaatcatctgaacaaaagctggaaaatgtttagttgtaaatttcaccaatgaatactacttagcaacacaaagttgaatgaagttcaactgttagtcccaagcttatggatcaatctcaaaacatgatgctgagtgaaagaagccttttaccaagagtatatactgttttattgcatttagatgaatttataggacaaaccaaattaatctatggtgaaaaaagaaacagcagttgcctctgggtgctgggacagggatggcctggaaaggggtatttgggggctgtctagggtgatgaaaatggtccattaatcatcatttatcttttgtttgttttgtttaatttccatttttattttagattcaggggttacatgtgcaggttggttacaaggatatattgtgtgatgctgatcccgtcacccagatagtttttcagtccttgaccccctcccactctccctccttttggagcccccgtgtctatcgtttccatcttgatgtctgtgtttacccaagattaactcccacttataagtgagaacatgtgatattggttttctggctttgtgttaatttgcttaggattaaggcctctagctgcatccacgttgctgtagaggacatgatttgttattttttgtggctgctgcatagtattctatggtgtatatgcacccccactgatgggcacctgggttgatgccatgtcttttctgttgtgattagtgctacagttttatactactctcaccagcaatgagtaagctttcccttttttctacagcttcaccaacatctgttattttttggctttttaagaataaaaaatggtctatattttgttaggagtttaggttatgtgtgtgcattcatcaaaacttgtaaatgcccacttgggatgtattcatttcactgtatataaattttacctgaatgtaaaaaacaatctgtaaaaataatgttcttcattgtaaaatctagagtgatcgttatcaaagacttagaaaaactagaaactgagaaaaggtggtatgatttgtggcagttcaattggcagaatttagaaatcatgaatagatatgtttattctgctatttcaaatacttatgtgaatctctagagccatgtgggaagatatctgcttcctgaagctctgcattcatttatagttttatgtggtcagggaggatttgattgagttggaaagtggatcatttgtacttcactttgatccatcttcctttttagaaacgagagaaaaggcatctgtgattgtgcctctgattgggtggcatccaaaatcttgtttctcagggtgagcttagggttcatctctattaaacgtatcatttgtcagacattggcatgtctagtgattcggaaagcccttggagtagcacagaaatgctatcataactccggagtgatcttttgcccttaccagtactttggcttttttaagttgccacttgaacttgggtaagaggccaaggaggtggtggctgaggcagtcaaatcttgtggaatgtggctgtcaattgatgccctaaagttaaggttggtctgtattccacaattgacaaaaacacatatacagttgtgggcccagaattggagtgatgagaagaccttgcataatgtctacacaggaggagagcaagcctttaaactccaactgccttgtgaatgttcttctcttttgatgtcccctcttccctctcactgctcaacctctaagtccatgctgcttgcatatacagataacggtgagttgcagatgatattataggtggcctatccagatccatgtcacctggcctgtgcttttagagccagctgctgtgaggattagttgggaagactcacagctgccttcactctcagagagttatccttgattgctggaagttatctagccagggttggttatagatctacccacccaccaatgacatcccctctccccgcctcctcacgtccgcttctcaagcgcgcatacaattcttctaccccgcaaaagcctacaggactatcccattcccacagttaggaatgactccatggtacttttcatggtccagagctctctgtgggatcaggccaaaaactgcactttatttatcttcttcatgaagatggtgaagaatctcaacagaccttcaaagagatcaaggcttgcatctaagacaggatcaatgattgcctctaagaagaaattacacctggatatttgggtacctgtaattaggtgttggctatgttaatgttttgcctgctgtgaagctactgcatgcggtgcttgggtagtgccactcttcttacatgaggcagaaccaagaggaatgaccctcccacatagtaatgaaggggaaaaaacaaggcaaagcatgtttatttttaacattttgctcttcttaaaagggcatcgtttacacccattccatctgtagaactttcaacacaagggacacatactgaagtaatataaactctgaccttgagttattagaatatgccagagactttgtagttcctgagagccacaagcctccatcttttctctatagaaaaaaaaaaaggcttaaatcattggtcagctctcctgtgcttgaaattgtcaccgtttgaagagtggctgtccttttcaaaatatttggcattatagagtcacagaaaaagtgttaactattctgtgcatttacttatgttgaaaatgatgtcatgtatatttgtatttaataaaatgtgaaaggaaaggaaaataagttcttttcaaaataaaattttggtgccccggaaggtttctcagcctgcctgcagcatgagttttacttaaagcaaaaagcactagcattttttttaatataatgggatgcaatagaagataactatatcaatcacctatttgtaaaatagtgctgtgtaacaaactatctcaaattaaaataattaaattagctcaggtatttttagtttgtcaacatagactgggctcagctggcagttcttctggttctggctgggctcgcatgtgcctggcagctggctggtgtttgagatgatggagacaatgaagctacatggttctcattctccagcaggccactctgagcatgttctcatggtggtgacagaagagcaaagatgagagcaagcaaggcacttacaccctttcaagcctccacctgtgtcttacttcctaagatcttattgactaaagaatgtcacctagtaaagcataaggtcactgtaggaggtcaatacaagattaatgatcaaatatgtgaatgctgggaggagcaaagaattggacacattgagaaaatctaccttatacaagaatatacatacataggaaattttattaagtgaaacatgaaactcactagctagaaccccaaagctacaatgtacttcacattttctctctgttttctttccagaatcttgctcctactcactgaccttgacctttctcattttgaacacttcatttctgtttcttggaatatctgtttttcttttctatccaaatccaaaatattcctcaaagcccagctcaagtttatactttcctggaagcctaatatctgtgtcattgttcaagtttgtttttatattactttatagtcatgattatttttatctgtataacaatgtcttgttgcttcaatgtagtctaagctccttcaagtaaggaaccatgtcttatacttacttgactctcccgaagtaggcttattgtatagtaagagtttaatagtaagttgattgacaggtagttccattttcaaagttctatgctaatcccttttttctttgtctctgccaacattatcttcctctacatctgagatggcatctcgagagtcatcttcagtccattagtaacagctgtcttggagaattatataaagaacaactctagccataactaggaaagttggaatgagagctaccatagattagtaatgtctgccataaatagaggaaggggataggccattcatatttactaccaaaatagttcttaattttttttcggagttgtatcttatcttctaagctcagtggagaaatagtaatgatattcattgaagggaaatgatagtgatggcaaaatatcagaatatatgtaagaagccatatattcaggaaaaatcacttaataataggcagtattatgcccacagaagggctttcagccaacagacttgacttcaaattctggttctgctgattactatcactgtgactttaggcaagctatataacctttgtctgcctcagtttccctatgtgctaataaatggcaccaaatgagggttgttttgaggacttaatgaattaatatactcaaaacgcttagcatttgtcttggcccatagtaagcactgaataaaatactagctactattttttattaagtagtggtaaaaattacaaataggtaaaacatacctttaaagttaagatacaatgtaactcctccatttgaaatcttagatgagggcagttgatgagaggaaggggaggtgagtgaccctgggcctaacagagagctaggctattcctatgataccaggaacaactttgagcaatgattttgccagctactggcactttatttcagtcatatttaattagagacacagagccactaatcaagattggttaccggatttgaccttatgcaattgtggaagctattaaacagtccctatgagtctgtagtcttcacatctgaggatggagctcaaagccaacagggaaggaaggatggatataaagtgggggagagcaaggcaagctgggctcatgagctagagccagaccttaggagaacagactggaactcaggtcagttcttacttcttccatccttggactaagcagggatcctgtaggagaagctggctccttcgtcatggagctgaacatatgtctgaccgaggaagtaacatatatgtagggacagaaaagggtgaagcaattgcatgcaaaataagtgagccaccaaaaaagtgacaaagggcacctgccctgacctgagtgggaagagaagtggggacactttagtttgtttttccagattttctgcaaaatgtctcttgtggctcatggtaatcataaacagtgggaaatcttgttaaccctagttaagctgacacattttgaagagtcaccatactcctctagtgaccatgtggtacaacagaaagagaaataactggccttcaagtcaaaagatctggaagtgtaaccttggccaaaatcacttaccctttctcacttgtgttcttgtgttcttagttttcttatgtataaaatgagggaggaaggtgggctttttcatccttaaggtcccttccagctcttagtctgtaattttgtcaccttactgcctactttcattaagtttcttgtgtctgccggtcttgcttacatatttcctgctattctgccccaagacagccagccaagccaaaatgagcgtaggcaagggaaagaagcctgagtgtttgcctaaacacttagggctgctgaagtcagatgctgagggcaaagggcaaccgtaagtgatggaattaaatgtttactgtgttaaccgttgaccactcatggatttcagagaaagctgaccatattgattggagttttcactcctgtttttctaatgatatgcaatcttaactaaatctgccagctctcagggggttgaacgctattcagcaacattaatttctttgcctacttccagttaccagcaattataatcttggcagttttactcaccttgaataagcacttgtatgctttattgatatctggcagagctggctccttccatgcaaagacccacttatgtttctgacactgctaactctacaaagcgctcaagctgcagatcaacatttgttggacattctgggggaagatgttatttctgaatatggcaggacagaaagttccaagaaagctcaaagaaattgtgtttatatgctcttagacacatttttttccatcccctcccctcaaaatcagtgaatgagccagtcctgaaagacacttggcacagtttcacagtctcttattgacaatttccttgctgggaattcacctagcctggagagagcgatcttgcctgtaatgactccttctttatagcatacaatcaattagtgcttatccaatatttaagacccagcccctcacgccaattcaggacagttctgttggtcagtctcaacccggagttcccatgagattggccgagacttctatggcaactgtaacacagccaaacttctgcttttaccccaactactcccttccatagttattaatcccagaactattctctaataaatgcctatatacaaacccctatctccgggtttacttttccaaggaatcagtgatataactgccatgacaatgaaagagatcaaaatttgggagacagaaagacgaggggtgggaagttgaatttttttcctcatttataacatgatctggttgggaggattcaaggcagaccagttagtacagatccccagtcccttttggggatcataggactcttgttttatcccctcacggcatttatcaccttctctcataaaaaatttatttatttattatgttttatgttgtttgcctactttctgtctatacccacccccggcccagataccctcaaacaagaaagtaaaacccaccaagatgaagttctttggtttgttcaccagtggatttcaaacacataatagatggcaataaatgctaagtgaatgaatgaatgaatgagtgaatgaatacagtcagggagaagagctgggaggccatgacagtaatgtaggtgagcagggatagaggctgaatgacatcaaagaatggggatgagaagtggatagagtctaaggttttgtggataatagaatgcataaaagtgctttagaaacacataaagttctcacacttgagggtacatcagattcccttggagggcctcttaaaacacagattactgggccctatccccagaatggatgattctggatgtctgtaatcaaagtcccgtttgggtcattatttattttagcaacatccaccatcatagattgtgagccccatggtaggaggggctgtgccactctgatcacacaggctgtctttcatcactagtggagtgtttggcacaagctagtactcagcaagatttgttgagtgagtaatttacacccccccatccccccgacacacacacacaacaccatgcaaatctatgcaatcagggcacttgcaaatccttagtattatcaaaagaaaaatgcaaattctaaggcattcttatgccccagttttgaccagaattgacctgtgaagatgagctcaacatccaatccagattattcttagtgctgttcagagtgggaggatcaacagcctctgctggtgtatgctctcactaatcattatccttatttccagttaataaggtttttgtctattttattcattgtagaaataaagaaaagagttagtgttgaccttgtaaccataaagcttcatagttttaaagtcaattattaaataacccattcatctttcttcttttagtttgtttgaaactctctttttttaaaattattttctcctgggcactactggcaacatttatttttcttccattgagaattcattaagaattatttcttttcttttttttttttggaaatttatctaacatctcaacttctttattggaatacagagaccaacactgaacttggaattcataagtaaaatggcagttacaaccagatattatttctcttaagccttatctctgtgatgcatcctagtattcataactaggtcttaatcaaaaaattattttgtaaatttttagacagtgtatgatgttatatgacttctaggacttaaaagtcttttgacttttaaaagtcagagatatgtattttcctttttgaccttacagtctaccacattcattattaattcctaacctgattttctagtgggagaagggggaggaatgaaactttcaaataatgtaatgcacctgaattaagaccattttgactagtcaaatgcagatatgcagatattttaggccttctgaacctttcatttcatagaaatagaaattgccccccccctttttctttggtagtcatccagcttgtttctctgttgtacaaataaaacagaaattaggacagcgctgagattgttttattcatccctgagttctcagaggttagcacaataccttccacatagaagatgcacggaaaatgtttgttgaatgattaccaataatgaagttttattatcatttttatccaagggcactgtatttcattctgtctatacccactcctgtgtttattttttttgggttgtgtgacaatattatgttcctggaaaagcaactaagaaaaaattgaaaaaataaatgttttcagtgggccaataagatggttacttttgtgcatatttttgtggtctgatgttcaaataatacaatagtcagagaataaaatccttaaaaataatgatttataatctattaagtgtcaaaagtgagagtagtcatcccttcttacttttataaaattgtcactcttttttgtttggtaaaagtgatatctttttaccagcccttccaacagctaattccttccactgccacttaaagtagtctgtgtttagctgtattacatttatacctactcaacttatcttttagtaatgtagtgtgtattatatataggcacccatacacatatgtttaattatgcaatgactgctttcttacagcttctaggacatgggtcttagagtcacaaaacctagtgttgaaatcttacttctattattgcatcagttatttactgccaaataatgttgcataactaattactcccaacctcagtggcttacgataataagcatttatttagctcatgtatctgtaggttggaaatttgagtggggatcacctgggcaattctggtcttctgggctggctcactcatatgtctggcgagtagctgacttctgtgatggggtgactgggtcatgtgtctctcatcatccagaaggctagcccaagattgttcacatggtcgctgggcagggctctgagagagagtggagagcatcaggccctttgagacctaggctcagcatgacacactgtcactctggtgcattcttggcaaagaaaaaaaaaaattgcaaagctagctagaatgaagactccactttttgaaggcaaatggtgttgagtacaagaaggagggggtgacttagggccatctatgtagtccaccagagctattcacaagctgacttggaacagtttattccaaccttggctagataaacaaggagagttcatgcttttctttttcttattgtgaccccatggaggtgcattactctagtgaaataaagattctccttatttaccaccaagacatgggagtgaaccagcatacataatgtcactatccaacactgggaggaaaggagaagcctcttggggtggggggaagggggagggatagcattaggagatatacctaatgctaaatgatgagttaatgggtgcagcacaccaacatggcacatgtatacataagtaacaaaactgcacgttgtacacatgcaccctaaaacttaaagtataataataataaaattttttaaaaaaagaaagaaagtgtttagcacgaggttttgggtgaagaagatgagacatgtgaggtccgggggcatggcattttggctgcctagatatcccaggatttaggggaatgcataactttctcactaagtatatgatgaatgagtaaatatgcttctctatatgttgttattgtgttgttgttaataaagtgtgtttttcacactgtaatctttcagagtaacacagactcatatacatatgaaattgaggactgtgggtatcaactacaaaacatccacgtaatagcagttaatactatttgttacatgccagactcagttctaggagctcccttctggtaacacagttaatttttaggaggtaagtattaggtaatataaacttccctattttggagatgaggaaattaggttcctagacattaattgtgtgtcccgaagtgacacagctaataaatggcaatggcaagatttgccctcaggcaggaaagctccaggctcagaaccctaaacccctattctacagctgtggcttcagttagggtttccatatgtggtcactgttgtaattctggctttcttcctttgaaccaactctcaggaaaaccaaaccatgacttgcatgttgttccatgggtgtttttcatccttctctggctttgtcttgacaaagtcatttggtacatatctaataagactttcctttgccatccattcacgtgtcatcaaggaatgcaaaacagttttaatgcaaaatacttgtaatattaggacagaaagaaagaagaaagaaagaaagaaagggagggagggagagagggagggagggagggagggaaagagagagaaagaaaagaaagaaaaaggaaagaaagaaagagagaagaagaaaagaagaagaggaagaagaggaagaagaagagaagaaaaggaaggaaggaaaagaaagaaagggaaaatagaaaaggaaggaaagaagaaagggaagtaaaacagggagggagataaagaaagaaagagagagaggagaaaaaagtataatggattccaatatttttctgtcatcctcaatgttcggctcatactctgtacttctgtgttagcaaacataattgaaataaaccgtttaggtagtaagctaattctgcagcattcaaaaaagacagcgtgcaatactcacaatttgcaaaactgttctcctttttttgtttgcataggtttatacatgttccctttttatagcacaatgtaaacacatgtgagaaaaactgatttgaaatagattttaaaccaggcagcccttttgctgtttcctaattggtattcatcatacctcttattgttgtgttctaagcatttcgttcatttgtttttcagtcctcagtttcctcatataaacttccatgatctgctgcctaagaatttggtatctgttaatgaaaatcaacttttaaaataagcattcttcctgccctggcaattaggagaacctttgaagacattgggggagtgatatgggtcctgggatgggaacagtaggattctgataacaagccaaagagatcagaaattcctttaagtattttaccggtaccccatagtcctcaaaatcacatacacaaaatatcatgggtacagatcaacaacaaacttagactggctttataacagtgcaaggtctaaaactttgttaccaagtcaccaaaatattcccaaataagtaaaaatcccacattaaatgccaccatcctttgtctcctctctcccccgcattgggttctggaggactttggtcatcatagccgacatgtcagtgtcccctcgatagacattcccttggcatgcagtatatactgctagcatcttgttataagtacctgtggctttctaagagatttctctgggttccacaatgttttcagttacatgctgggcatgctgaaagtatcaaggaattaaagcttctggaagcagccgtccactagttactaagggatttgatagaaaaataccccaggtccatcaggttttagtaggggcggatctgaggcatgttctcctgatctagaattccccagcagaactgagcccccattgccaacaatggttgcctatttattaatattctttattttggcttctttctcttcattgtcttgtattcctgctcacctgtcattgcttcctggggttcctttccccagataatctccctccacttcagctctaattcagtgtgtttctgggaggactttatagaagacatctaccataatattacaaaaattaaattactgaagctattcaaattattttctgatattttcattctgtccttttcttacttctatcaacccatccccatgtgtcttttttccctgcagtccaagattatttagccccatcctacaaggtcaagtattttatacaccagctaaggagtaaagtgtaaaatttttaaaaaaaatcagtaggtagaatattacactggaatcttaatagttcttgctgatagtgcccttaaggttaaaaaaaaaaaactcattaaattccaagagagaagatggttataaaaactgaatgaaaagatagaagttattccacaagcatttcttaaattagtttgttaagagccttagatcatcagacatcaagtagaaaaacacttatccaaatctacagaaagcatttctcagaaagtgaaagaatgcagaaatttacttccaaagttttgaattaaacatgacagaagaaggcatcaatttggaaaactttctcagaactctcccttgcttggtagagtgggcagcttacttcatctgtcagaggaaaggaagtagctgttactgaccagacgacatgtgttgaattgtttgaggctgtaccgcatgtcaagctttgacagaactgacataaaaaatatacctcacattgtgttagaattgaagagaacagctcttgttcattagaaggtgaggctcttcaaagaagcttcctgatgcagcccgatctccagctcacagaatgaaaagggtttcctataaatctcagttaactgattgctttggagacacagtcccaagagggatttgaagccagcataaacttgattatatgcacagcttgcgggatttggtcattctctttctttcggatatgttttgtgttctttctaaaatatagtcagtgatattttaagttgtttataaggtatttataggaaaatttatttataaaatacacaatgttccaattatcaattgctgtataacataacatcccaaacttagtggtataaaacaataaccatcatttgttgttattatctattgtggttctgtgggtcaactagtccaggctagataataatctttccacgtccctcaggaatctgcattcagaggatgcctggggctagagcatctcaaaagcttccttccccactcacatatctgttgtcttgtctagggagacccaaacagctgggcattggtgtctattcctataaactctctccttatggcctctccagcaggatggattcaggatagtagggcttctcattcggaggttcaaggctccaaagattcatgtcctatgagggagcaccaggcaatagctgtgttgcccttcacaatctaggcttctctaggttagaagcaagtcactaaagcagcctatattcaaggaaggggcatcgattttacctcttgatggaagaattgtcaaggaatttgcagactttttttaaccattacatttaatgattacctttcatcatcatagggccttattggtatttgcaagcctagttcacttaacctaataccatgcttagtcattgccaaaaaaaaaaaaaatctggctaatttaatgtatcaacaattataatatagtgatgcttttactaatttttatgctctattcaactatcctttaaaatatacttatctagagggaagagttaagtgagaaaactgaagatttagaagtatgatgttgatttctaaatcaagaaaaacatatgtactattgctttttcactgaattaaactgatttttacagagtgactgctataatcataacactgggctagactactgtgattaatacaggtaagtaaagacggttttaaaattatgaacagaacttagtcctagttcacagtctctaaactggtaggggtgtgtgtgtgtgtgtgtgtgtgtgtgtgtgtgtgtgtgtgaaactacgtgacaaggattatttacacaccattatagaagtcacactaattaaatctaatgaaagacatgtattcagttttgatattttccgtaagagtcaggcaaaagttcccaacaaacttctaaatctataatcaatccaaaggaaattataaacaataggctttgtatagagagagtaggtggatcatattaggcaataatcacatagttgatttcttactataaattatgatttatgtatcataaatagcatacaaatgtttgttaaatgaatgagatcttacaaactattactgggaaaatctttaattggcagctcttctctgatacggggactccaagggtccttggaacctggggactggggacttcctgattattttcaagtagaagtgtttgatttatagttgaaagagaataagaccattaatgttctctcattttttttaaataaaagtgtaagctctgccaaggggcattttctcattggctttcagtgttattttggtctcatgaattcataaacatcagcatctctacctatttccaaagaaaaaaaatttacttatgctcaaatccttgtcacagccactgcttctagggaaacataaactaaggcagggtgattgcagttctgggtatttgaaagaggttcttatggatttttccatgtgggaataacgtctaagtaattttccaagaatgaaaatactaaagtttttgataattaaagatactgacacagtacagacacaaacaggtttttcgggtgcttttcttgtgaagctttgcatttaaactgaagttttattcatgtaataatcatgcccctactattcgcaggagtaggaataatgggagttaacaggtgaggcagaaaagaaaggacatttcagagatgctctgcaataaagaagtgactgaaaactatagcactggtttttcttggttggatgaattaatgcacattctgaaaaacagtgttttagatttcaagttccaggtcttccagaaggagctatcatctgagctaagattgatgcattctagaccattattctggactcttctctgataagcccatgagataattttgttgaggtgtgatcatcccagcgttttagttatgtttcactggaaaatttaaaatattttaataagcaacatttgtttgggagagatacactgtccctgaacttggcctactatgatgggaatcctctgttctgttcaaaggcagttttctcaggcacctatggagtcagagactgatgtgacacttaagtggtacttactatgttccaggtactgagctgagaaatttatcatgtattaattcatttaatcctcacagccagccatttaatcatttcatctattttaaagacaagggtcaggaaggttaagtgacacgtgtaaggccacacacatatgatttgctggaacttggattcaaacctgtctgtccttagagtccatgcttttgtgagactccacctctggctgttcctgaggagttcctagttaagcgggaatgggggtgggcaagccagtgatgacagggttaggtggatactggaatattcaggaagtgccagaaagtacagaggatgaaaggcttgacttcaccttggatatttaaaagctccagaggacaacaccttcatttgaattggaaaggacatagcccattggaaaacttgttgtttccagggaacaaaacattttagactattttgaaaatctgtatgaagctacaagtacttgtatttggttttataatctaggtaacagtaattaaaagttgattcttttaaaagagatttacccttcgaggttgtttaagtaaatattttgctctctgttaagtgttcctacttggaagtgtaaatatctgcaaatgtgtttatgtgagtcctctaacttcagaaagagtcctaacctattttcttcaagctcttcatactaaatattaattctctgggaaattatatagtgatatattgacctctacagaatagattcttcatataaattaaactatgtggtttaattttctgttgttactcatttctttagcttgtgagtgttcacccatgtcctgagtgtaagattgtggggctggaaggtttgcattccagcccagcgcttacagcacagcacaagctgaaggccaaagaataggcgattttcagttgtttttaagctttctaggaatgataggttatgatttcccttggcctgtgatttacctagtttcataaaaagtatattttccttttttatgactgacaaaattgttcctagtgtaagttacctgctttttccgaaaagtttgttggtgacttagtttaactattaacccatgaagtctctgaagcaacaaatgcctattattaatcatgtattttgtctgggaaacccccaatgtcttttacttttttaaaagaaatatgtataagtcaatgccagattgcatcctcactttaattttacttctatgaccctccagaattttctcaaaagtagacctgcttattgggtctgaaacaccacactgaaacagatgctgatacttgctagaatgttgacagggctgctttcacagcgtccaaataaaactgacttaaactagatggaggttttttgttttttgtttgagacagggtcttgctctgtcgctcaggctggagtgctgtggcacaatcatgattcactgtagccccaacttcctgggctcaagcaattatcccacctcagcctcctgagtagctgggactacaggcgtgcgccaccatgcttggctaagttttgtattttttggagagactgagtttcgccattttgcccagactggccttgaacttttgagctcaagttatccacccaccttggactctgaaagtgatgggattacaggtgtgagccactgtgcctagcctgtttgtttttcatattaagttctgaaccagagggcagtttaatgtgaccctactccatttggttgttgaggtgtccaggcttcttttatgttgttccgccatatgctaaagtacttgtatgtctgaacatgggttacagcaccatgtcctcattccagttgtggggagggagaagaaagtgggaggaaatttttcccttgaaggacataatgcagaactttcataaatcacagatgttcacattctattttggccagaactgagacagatgcccatgcttagctgcaagggaagttggaaaatgtagcttaatgcaagagttcaaccaacagactcagaagttgctcttgccaaaacgaagaaaggaaaacctgggtattggaaaacagcctctgccatagaaggcctctaccatagaaggcttgttagcggcctcttccatagaaggcctgttcatcatagctcagttcagaatatcagggtcttcctaaatttatgtcatgataattctaatttctaatgtttaagttaacttttagttcacttgtgccttcaggtagttttctgagggttttctggctgtcaatttatttctcacattgttgaaaattatgttatcttctagttgccaccatagaaaattaattatcttgtagttcatttcactaactacaaatatatattatataatgtgtacatatgtatagttatatatatatatacacacacacaaattagtgttatatacatatacagtaatacacatgcttatatacatatatgcacatatataaacacacacaaatcacacaaatgcaggttgagtattctttatctgaaatgcttggggccagaagtgttttaagattttggattgtttcagagttcagaatatttacattatactggttgagaatctgtaatccaaaaatctgaaatgctccaatgagcatttcttttgagcatcatattggcactcaaaaagtttaggattttagagcatattggattttggattttcagatgagagatgctcaacctgtacatgataacatgactaggggtgttttttttaatattttgttcaccaaatctttttttctctcatttgtcttgctgaatgcctttatcatagcttaaatttgaattttctgcttctgaacagtgcttaaaatggaaagaggaggcagatgctggagttgctggtatctgcagccagcttctcttgtcgctgtgttggcttttcttaatttttaagcatatgacatatgactagttgttttttgttttttggttcattgcctgattttggccctaactattccattttaattttagttatcctgcatcatttctgtaggtgtgttttatttgttatttctgggtgactaataaatatatacatttatatattattatatatgaattatataaactttacaaattaaatgagcatgtatatataaaaaataatagcctactgccactctaatatgcaactttgggtatatgaaagttgattctgttttgagtattcatatgctctgagacagatgcctcaaaataagatacctaacggagtacttgctgctctaggcttctagaggactccctggggtgaggattgttcagaaaggaaacacggaacataagcatgatattatgttatggccaactaattagacatctagtcaattgactaacaatgtgtgtgtgagaccctgtgctgggtacagagtcagggaaaagctatcaatcctgaatagccccagtatcttcagaatcaattactgatgctaacaatatcttccagtgtcaaatgagaatacaagatgcacatgactttcctaactaattactatgactcaattggttagtttgaggaggtcttaaatgacaaaatttaattctgtattcctgtatatatagccagtattttataaaagagaaatttggtgaaatggttctgtatgtgttgctatgaattgaaacaaattccagccacttgaaaagattttttaaagtcttatttgcttttctaccagatgtgcttggaagtgagtgaaagtctctcaactagaactgccaggtctttgagtataggtggcattttgtcttagcctaaaataaatactttttttttttttttttgagatggagtcttgctgtgtcacccagtctggagtgcactcctagcctccagtgatccacctgcctcggcctcccaaagtgttgggatgacaggcgtgagccaccaaacctggccaaagacttgtttttatccaccacatctacagctgtttggttttttctgtttgtttgtttgtttttttgttctcatccctgcattcagacaatcaaaatgttttctcctttcaatttccagaaaattacaatgatccaggttcttcgctgaagctaccatatctttgtttcttgtgcaatgataatgtcactgatggcataatgtcttcctctgctagtggagcctaaagcctgatttccaatgaagcttttcagcattgctctctttctaaaatcctcatctgacgtgggctgtggtttgcttttagagtttgcttcagagtccacctatgcaattctcagagcactgccacagcatgttctgaaatcagagttgggtctgtttagtctagcaacctcatgaggaccccgtcttatgattgcatgaactctcctacacagtagaaatgtgtatttctataggcgttacttaaatgtttgcaaaggagctgtgtttcagttttccctcttgtaattaaatgctgacatattttgcaattgaaaataggagaaaataggtaggtggcaagacggtgttcaagaataattctttcctcgggcaaaaaccactaagatcaagattccatccccctgattcttctgcaaaaaaatgtaggacaaaaccatggggccttaaaatgaatgagaacaataacatcgaatcaataataatagctatcatttataattgcttatcacgtgccgggccttgttcttagtactttacagtgtattaactcatcgtttcattatagacaatgtagagagcagatattactctcattttcctttttagattggaagctgaatcagagagaggttaagcaacttgcaccaagcctcacagctgtaactggtaaaggtgagggtttaacccaggcagtcagattgcatataaacactcaagaagctgcattttatagccgtagaagagccatgctgcattgataaaatgtgctccttagcaggcgctcaaatgttacaccagctcactggcttgagtaatcagtcctcctttcactggttcagttgcatcagacgagtgttcatttttcacacccagcaaccactctcagttcttaattctgatgaatgcatgtcaggctatggagctttcttgtttctgaagaagttgttggctcaggattcctattttcttgatagcattcaagggatcctgcaaagtcagcagagtgttctacaagtctgctttgaggacaaacttattgacatgtaacagattctgaagatggtgtctggacattttcatgccatttgttgctagttgagttgaaggaatgctgttggcacctacaacattagcatctacatcctttgctgtgtcataaaggatagatgtaaaatacaatgaactatgaaggagggaggtaggaagtatgacatcatattctctcagggcataaagcagatttacagtgtacattgcacatttaatatgcacaaagcgcttctggtacatatgaggttaaactatataaaataccattttggtaagtcaaaaacagtggactagcagaaaattcatccacacacatgcacagatatacacagactcatgtgtacacactgcactgtgtaaaggtatttatgttgtcactttagttaataaaacaaatagacaaaggtcaaaattacccagtggaattgggcttaacctccaaagaacaataaaaccttgtatgactgaaattagaaagtggtctgaggacccattcttaaaattctatcagaaaagaatgttttacagacaaagacttgcttttggaatactatgcctgctaccatattctcaaggcaaaattcacacattgaaagaatgagattcaatacgtgtgaagtttttttttttttttctatgttcaaatcgggagaagggcattatccaaagctgacatattgaggtttctttgttttttgttttatgccagtctgctgaaggcaaagccttttctcttggcaggctgatgccttttgcaaggttttgtggttaggggcatgcctgtgctgcagtgatgtgagcagtttatcagcaccatttttctgacagaagttactgaagcatggtgtctgagtccaccaaaccattacatcttcagttacaaggcacttcactaaaagagtggctttggaatattttgatcctaaacaaagagcttgttgttaaagtggtgttattttgttttattaaagaaatgagggcaaatgctcatagaaggtggaaactcactttcagtttgggggaaatatcccttaaactagaagaggtatatggaagaacttgacaccttactaacaggtattctgtggattttttgtgtttgcttcatatggcttaatatcacttcactctgcagaattatggaatgtaaggtaatacacatcaaagcagcataggtaagacaattggatcgagaattagcaaatgtaggatttaggcttatgtgtcccatttaaccatggacttttctggacttttgtctcctcatctgtaaaacaagtgattcaagaccgtgaactggaagatgtgattgggtgccgggtgtctgttcttaagagactctagaatttctggtcgctgaactggcagaggaacacacaaagcatttgaccttgctcccatctttcataatgccttgtgctgcccttggtatttaaatgaacatgattctactgacttgctgtcagcgggacttgcactttgggctgctttccagcagtggggaaggatttgggatgattcatcgacacttgctttcccagatgcctctgcttctgcattctactgtcaaattgagcaaatttgccaaagtcaatgacagattttatttgttccttgcaaacaggctaaggtggaaaaacctaaatagatcccaaaatacatagaatttcaatgtgatgtatattaaccagaaaattctgtaaatgtatagattaagtattagttatcacttgtggcatattatcaataatcaaaatgtactggacactattttaagtgctttccatgttgcatctcatttaaacttcatgaccactctatagtgtggtaactatgattatccctagatgagaaaatggagatgcggaaagactaaatgacttgcctgagattacacgtagccactcagtggcaaagccaaggttagagtagtcagactctagtgacagtgcttataactgctacattgtccctctctttggctaatggtgctccctacctggcttttgaggcaggaactctcaactcatagccagagttatggagtctagccctaggatgtcaacccaagtcagaagaactatttgtgtgcaaactttaccatgtataagatgtgaaaatagcacatacatgattagaatcatacttgcttaacttttaggatcttatttgactaaaatatttatgtagctgctttggaaggtgcatagctgtggcacagatggctagctgatcactaaaaatacacgtgccttttcatggcatagggtaattgctggcaaaagtcttctcaacgagggactacgtgaccatttctcaccaataaaatgtgaggagaagtgatgtgtgtcacttccaggatgacatggttacagagatgcgctttcctcaccatcctttccccagtccctgattgaatggagggaattccagtcatgtgctgaagattatggagccaaagacattggagcctgagttcctcaataatcacctgcaggaaagccatctgaccatgaatacccacattggattttcacatgagtaaggataatcttgcagtgaattaaggcactgagttctgtgttatggcagctaactagtgccaaaagtaaaaagtgttgttgctttcatccaggtggggattccatgaatgtccagctttttacaatgctgagtaagtcattgaacttagcagtgtctcctgttatgttttgataacgaaaatttttatttcatggcctcagagcaatgttttccaactaggggcaatattgtccttatctccaaggaacatttggcaatgttgggagacatttttggtggtcacaacttatgagaggttgctactaacacctagtgggtagaggccagggatactactcagcttcctagaatgcacaggatgtactcttataacctaaaaagcatctggcccaaaatgttgatagtgctgaagatgagaaaccctgtcttaggagcatgtttgcagccacagatgtgagcatctttactgcattcttgtgacatgtagttcaattcaactggtagagaccctgtgtggcccctgctctgcactgggtcttacttactggatatatcattcagggcacatattctttacaacaagactgttttggttctcaattcgcattctgtggtggaataaacattgagtggaatagaaaacattagctttgggcctggcgcggtggctcacgcctataatcccagcactttgggaagcggaggcggacggatcacctgaggtcgggagtttgagaccagcatgaccaacataaagaaaccccatctctactaaaaatacaaaattggccgggtgtggtggtgcatgcctgtaatcccagctacttgggaggctgaggcaggagaattgcttgaacccgggaggtggaggttgcgatgagccgcgatcgcgccattgcactccagcctgggcaacaggagtgaaactccacctcaaaaaaaaaaagaaagaaaagaaaagaaaacattagctttaaagctagatctttctgttaacaactatgattcgaggcaagttaataagcccctgcaagcttcacttccttcacctgtaactgagaataatatcatctgcctcatagatttataagcattaaattgaatggtatacataaaacatttactataatcactagcaaataacaggcattcattataaatattcttttccttccccggacttcataaatgtgacaaaaataacttgttaacaagatttgaaaccatacagtggaataaactagaaataatttactgagtgccataatgtactgatccatatttttatatattcttagtttattggtcaagtaaataactggtttccagagaaaaataaaacactcaagttaatattcaactctaattcatgccattccagttttaattccagtcacttcttgacaaagaattggtgaaccttttgacagccgtgacttagagaaatgttgctatcctgaaacaggtccaaattctttcttctgtggtcattctggttctatgtggtcttttgttcttttatatcctaggctagtctatgacccagacctacctctgccccatgcttttccatgcatagctgcttatttccttgtagcaaggtcaacatgccattgcagaacattctcaggtgctcttggcaattagtcaaagttcagacatcgagtttcagactcttcataaaatttcctataaccatacctatttctgtaccaaattctattgacacagattaatgcaatgctaagtcttaatgaatgaagctctattcatcaatacttgaactacaaatgtcttttcctattgcctggggagtgtttgctttgctccaatgctataataaatgttttcaaagtggccctggaagttgatggaaaaaataatatttttataccagtgcttgtaattttttggtgacatagtatacatagtaaaaatatatatgcagaccatttggtgctggaggtgacaagctgggactttgtactcctgatgtctcacccagccagggcaaagggtcaatatctaggcagagctgtcacaaccattcacgacatgctgacttgttgaggaactctattctagactgccttggtgatgaaccataaaaatgacaattttaacacaaagtcctagacacctccctctaacccacaacctcctaaatagttcacattaaagtcttgtcctttatttttatgttttgtgttgttatatgaattgtcactttatctttaggaacttgattcatgtttcatgattttccctgttggctacacttgagggtctctgtgtatacatgagtagatctggtccccacccgtagttgctctcctcctgccttggagattgcttggtgctcctgcaatgtcttccttcaagcatgatgcacattataattattctgttctgcttcaggaatgcatatcaagttctatgcaattaatgccattacaaggcaaatacagagctcttcttggcatctccaggacatctgtaacgctgcagaagcaaagcattgtagtaatttatgtgacttaggaacttcttttttctatgactgttaaaatggcatttttaaatgaagaagttattagccaagaaaaaaggacttctggagaatagctgactgcctacaataacgctggtcagggaggatttgggttctggcgctgcttctagaggcacgttgatcacagcagggagggattcagaagggtgaggcaaggctggtagagcagcaggatccagtgggaacatttggagagtctttagcctggagaaaagtagtccaaggggatgcgggaagctatttttagctctctgaggaagaattcctaaaactgatcttgaattctgcggtcaacagaatgaagactaaagggtaaaaaggtagttacagaaagaaatgcaaacaacacatttaaaaattggttactagtgtcaacagttaggtgttatcctctcagaagattatctgtgtaaaccgaaacctacacctatatacgtacatgtttttaattatgcgtatatatttaagaatagttttacaaaaatgggattatggcccatgtattttccttaaactgggaatcaaatttggatttcatataataaagacattctatgaattgggagtatctaggattctcagtgggatagtattaccagtggaacagactgcctcatgagtagcaggcttgccatgagtacaatagcataggccagcaggtctccacatttagtattcatgcacatctcctggggatcttgttaaaatgcaggttctgattcaggaggtctgggctggggtgtgagatttcaaacaagataccaggtgatcgtagtcctaggactacactttgaggaataggtgtctagcttaacatccctagggatgctagaaatagattcctgtcttgggatgggataaaataaccctaaatttccatataacttgaagtttttatttcatcttgattttaactttattattttctatggaaaagaatgttgattatataggtgtttcatttactgtctcaccattattcatcattttttttcttttctatttctctcttttctccagtatagcctacaacactgtgatgataactatgattataatctttccttttttaatgttcaaaacaaatattatagctcttctactggttgcttatatctttatttagaaaaacatgtatttacatattttaggatcatttctatatgtctaattcagttcccatagtaatatgaagattatatttaaattatgcccctagtaatgctaatagaaggaaccagaatgaaaaataaaaatagataataatgactaagaccaattaaacacaacttatgtgataaacattgctttaaggggtttgtttatatgcattaaattatttaatccaaagtgtagacttatggaataggcattatttttatcccattttattgataaagaatgtgaggtataggaaaattaaataattggtgaaagtcacccagtttgtgtggtagaattggaacttgaacccaggcagtctagcttccaagttgaggatctcactgttatagccatattggaacaattcattaggatgatgcaaaataagatgtcaccttatatcaaaatgtgagtttttatttttgtaccattatggtaccatctttgttgataatttagtcttttaaatagacatttagcctttgagagcatccatgctgcattttgtaatttctaacttatttattgaattgccttagacatatggaaaatgttggactatcctatttaaatttcatgaaataggccttaaaatcgcacttgtaagatacatctgaaacttttataaattcataatgataatttggtgacccttgctaaactagaggacactgggatttcaatgttggtttgaacaatttagaaacccttttgcaaagttacaccagggttttaagcattctctcttaaaagacaagtggaaataagtgatttcttttccaaagcggtttatcttcttggtaagttaactatgtttaagatttagtattcactccttaaaatgtttttctataaggaaaatgaaaaggattgattaaatgagtaagagtgaggtcctggcatctaaagttgtagagttgtccatggcaaggacatgtgctcatttcagcacattatgaccattgctggagacaaggatgaacagagagggatgaatgatgcccagaaaggtgcctgtaaccaagactgtggttctcaggaagccagagacgtccaggattcagagatgtgaaggcagtggcggtacttccggactgattcacagttctaggaattagcaggggctgtctgtttctatttcccaaataccttaatttattaaattttaataatatgtaatatattctcatacttccaaaaatataaagggcaggattttaacaatgagaggcatgttaattattcacggagttttgcacattcataaggaaagcttagaaagccctatttctctgtgggaatatattccgccagtggaacccagcattataattattttgttaacattaatgggaggaatgtcttttcatcgatacccttttcttgaagaaagcattaaagtgttctggtaccaagataattgttaaatagaaagggcacctctgatgggtattctctgtttcattgattctttttccatcttgtgatgttgatgatggtcaagtctaaggagcagagctagaacaaagatgaacttaaaagtcatcaataaagaggtattttttacccagctgtcagaacaagaaaagttttttgtacaatttttaatcttgtatattaacggttcttctttaagatataatttatatagagtagaatgcacaaatctcaaatataacactcagtgaattttgacaaatgtatacacctgtgtaaacacagcgtagattaagatagaacatttcatggtcccagaaaattctcttgtgccctcttccagtcaatacctctctctcctacccctgcacgcacataaaatacccagtgatgactattatcttatcatccagcttagtttactgataattacctttcatttaggtggaatcacatggtgtgtttttgtgtttggcttctttcgtgcaatgtaattttttttgagattcatccgtgttgttccatgttgcattcctcttttttattgctgtgaagtgtttctttgtatgactttaccacaatttgtttatctactgtccagttgatggacatttacattctttccagttgtaagctatgatgagtacagctgccataaacaattttgtacaggtcttctcatggacatacattttcatttctcttgggcaattaactaggaagggacttactgagtcatggagcaggtgtccattttgctttattagaaacctcagttttctgaagttctgtgtcactttatatctcaccaggagtgtgggagagaacaaagatggtcttgatcacagtggtatgctgtcacttgctcctcatgtgggcacttccacagtcttatatatcactgagctggaaagaggaggagagaatgataggctggggacaggaggcaatggaattatggagatagtgtattggagaggtaattgatcctgcccctgccagcaagaccagctcatttactcccagaactgctcctcagcccagcgatgcctgacaaccttccattaaaagttacaccatgcagactggctgtgttacagaattaattccgggactggctttcagcccacttgcaccttgacctcacctctgcctgttttctctcacgcccagttcatgtgtattcatacagcttcacaaaaactctcttctgttgttggtgatttttttggttgatcctcatcactgaaacttcatagtcatgagctgtctcttacaagatacataactttgggccagttacttaacaaccccaagtttctgttttcttgtctataaaatggggatcagaatgctatattaaaaagttaatggggccaggcactgtggctcatgcctgtaatctcagtgctttggggggccaagatgggaggatcgcttgaggtcgggagttcaaggctgcagtgatcacaccactgcacttcagcctgggcaacaaagtaagaccctgtctcttcacaaaaataaataaacaacttttaaaaagttaattcaatcattaatgcctataaagggctcagcacatagcatgtgctcagtaaacactactgtaactcccagcacaacccctcctgttgtacttcctacatatgattggttttccaactctctaattccccttaattgataattctagtgaaataccctcctgggaacggacctaggaattcctgcctaggcctctgcctttccaaggctcatcctcaaaccgttactctgagacaattgtaatgaaacaagcaccatttatacggcaaactttaaagctcctgctagcttgagctggggctctttggatttcctgtttcatattttccaggatgaggattcgattttaaggattacatgctaaaaatagacctctattatgcattttcaaggattttaatatattgttaaattctagtttttttttgtttttgtttttgtttttgagacggagtctcgctctgtcgcccaggctggagtgcagtggcgcgatctcggctcactgcaagctccgcctcccgggttcacgccattctcctgcctcagcctcccgcgtagctgggactacaggcgcccgccaccacgcccggctaatttttttgtgttttttagtagagacggggtttcactgtgttagccaggatggtctcgatctcctgacctcgtgatccgcccgcctcggcctcccaaagtgctgggattacaggcgtgagccaccgcgcccggccaaattctagttttaacacatagagtacctcccctttaaaaatgaattgttaccaccggccgaatacctaaacactatcattctgtgctcctgatgttcctgtgatctcatggagtctagggtgcctttcccagtctcaacagagaggacttcatgagccctgggtacagaaaggtcattggttttattttaaacagtgtcagctacctgctgcccactttgttccaagctcttccttggccctgctattttcaggcaagatgcccatgaaccagtacagctcttcacactcatcccttctgcctcttgctccagaatcatgcttgggtatcacaagcctacatgtggaccaacctcctttcccttgttccaccatgcccccctcccatatacacatcacaaagcttctcttccccatgccttcactcacattacccctctctggttagtacttcctcatcaccaacatgaaatcaacaggtactactcattccatgactttgctgctctcctgtacagccaaactccttagaaagtcttcattaacttctctaaaggaagactttgtagagagtcttcactgtgcttcccctcctcccagtctcaccccaacacactccattataactgttgtccgctccactctgctgaaaagttgccaatgtccaacatcttgtcattccttttcatgaaacttgaccccttaggctcactttatatgcctgatgggcctacttcttttttgaaaggtgctcttctcctaacttctgggacaccggatttgctgttttttcttcctggattcttttctctcagatcttcatggggatgtttcttctcatcatggatataacccctttgcagaggccctcccagtcccaagcgatcctaatcaaagcagcttccttcaacctttggcctgactttctacctcctttatatttttaatagcactaattatatctgaccttctcatttatttatgtagatgttaacatttcatgtggaagtttgtaacaattgcacatttgtcaataatgatccctgacattcattaatgacctgctatgtgctaattctgtcctaaattagctcgtctaatattcaaaataatgttatgaagtaggaactactatcatcattttttgtatgtgtaaactgaggttcaaagaggctagataacttgccttgattccaaagctgtaagtaacataatgagaattcagacccatctattttgatgctaagatctgtgatataaatcattgacagaaaaaaaaaaacagtgaattaagctgtgtccccatgctttctaggggcacaaagagagatttggtgagacagaacatctttaaaggtaccacctggagagaactaacattttgtttgctctggagtgttgagaatttaaaggtttggctttgtgatggctcaagcagtaaatagatcacacacagtgaggaattcatctcattttgcatcgagtgtgcaaagcagtcataaatgatgaagaactgcattgtgggtcttgtgtaagtcttagagtaagactataaatttctaaaacttgaagtttgtaaacaaaatatacattagtttactcattaatgaatttataatctaagatgaactgaaactagatcctagttaaagcaaaataaggaagatgcactggtctatattttctttcctttgactttccacttaatcattaaagccatggccttcatggattattggcaagggaaagcagattgtaacacattttgcagatagagagagcaggtgtttcccacctgttcagttccatctccaggatgaactttgccttcattacatgaatccagagcatactctcccaacttggtagtgctcctgtgaactgttgatctgttactggcaagcctgaatagcccggcgcaagagccagtctgcctagaaaccctgaactgagtctaacctgttctcagcaaatcccatctctgcctctctggtgggtcctcacggcacccttgtctgctgcctattacttcccaaagaaagagacaaaaaaatccttggaagtgttacactaatgactttacatataaaacctctctcagaaatgtctgcatttttctggaagaggatgagtagaaaggtcaataggtagccccacagaatgaaaagtattattcagctacagtagatgctgggggccctcaaatcccaacagtccaataaatcccatccacatggatatccaaggaatagttttatacaattggattataagtcaagtatttgagggagaagctgttcactaatcgcccaaaacattcctccagtctgcacctccttctcattcccacagcgactctcccttttaggatattgttgttcatctcctagtccacttttcaaacttaatgtgtgtaccaagcatgtggggctctaggtaaaatacagatcctggctcagcaggtatgagatggggcctgagattctacatttctggccagcttccaggagatgccagtgccattggtccaccaaatcacactttgtatagcaagatcctagcccagaactttccaaggcagaggaggcctcaaaatcccctgtaggcatgtgaaaacacagatctctaggccctatggcaagatattctaattgagtaggtctaggatggtgccccagaatttgtatctttaacaagttatcaggtgatgctgctgctgatggtctgggaaccccactttgagatccaccatcctagattattgtagtagcccgtgacttctctctgtcacctgtacttcattgtttcactgtcaccagaattatcctttaaaattctaaaaataattactttgtacatgttttaaaaactgctaacgattctcaatggatcatttagtatacttccaggcttcttggcatgctgtaacacacagttaggtataagcagccctaagaagtttttcagaggcctgcccctctggttatctcaatagctgctatgagatatagcccacccagttcacatgcctgtatttatcagtgatttagagaattctttatttcaggaacttgtgcagaccacaaaagcatttattgaaaatgaataaacatatactatagagtgatgtgtgcaaactttttagtaacctgtaataagacaataccaagtacaaagccatcatgctttgtaggatatcaggattggctgacgtactcgttgacatcaggattccactgtcaacctccatgtccaatgtcttgagaaagtggctagtgtccagccagagagaggctgttctgtcctgctctgacctaaccttcacattggtctgccctatttttgttaattgtcttctgtgggatctcatgccatttcttttccaggcagctagatgcaaggattatttgttgttgctgatgtttgttttgttgggggatcttagtcctaattctttttctttgaatctgtaaatacttcaagtgcagtccataaagaagcttgacttgcctccagaatgcactgccagatgctagcttccagctttactaaccaacccgagagatggattttgtgggtttgtttggtctcgcagtttgtgccaactgggcaccgtgtccttagtccaccctcttctttgcacacaagtacaaaagggaacattttattctgctgctttgggtgggaacagtcactttatttatggggtctgagctaaaatttgatttctctattgcatggtgcactggctttatccatgtacatccacatcctttattattttcccatttcatgcgcaagttctaggcttctcatggtgttccaccctttgtggcttcagccttcctttccagcttcacctcccagtactgcagcccacctgctccagcgattccctgaaaaagtcacgtcccctgtagtatatctgctcccggtgctcaccccaacaggattaagcccacacttgtaggcctaaccagatcctaaactcaatcttgttgagcccaatgaaaatcaggtggtgtaactcacaaaggcaattgacttgaactcctctaggttttgcttttgtctggttttcaaaggaaagtgcatgagggagcagggaagtgtttgctgcaagcaaatgtttgaacgttcaggacagttaaaagaagaaaagatataagcattggtgaaagtgagcacaatagatgcaaatttggcacgctgaaaggaatttttgccccttaatgatctgtgttttctttatgcagcataacccgaggcaattaaaggcaggaaactactctaaccaactggcaattatgttttagtacatttggtacaatgcatactcgctctccatattttcagaatttttgaaaagtaaagaagcttcaaaactgtcaaagttggctcttctttcactcttcacgaagccttagtaggaaaaaggaaagagctgggctgtttgctctgggtccttttatgtgctgacatggatgcatttgaaggatttgaaatgtgcttcagtttgaaacttgggttccttttactgtttattcttttttgtgttttcacccattggtacccttgattgatagtgtttaagtcaggggacaagccgggggtttagaacattgatgtcctcagcgaatgaccctaagcttaaaagggagcccaaactcatcaggcctcgtgtttaaaaatagtttatttttgatgatgttcatgtgaatgagccatagtcctactcctcagggctgtggaatggaaagccttgagtagcaaatgatcgtagttgcctggccaaaccctctttctggtccaggcactgtcctccagcagtcacaggtgctgccctgggcattgtaggatgttcagcagcactcctgcacttgaccccttagatgccagcagcatcccaccagggtgacatccaaaatattcctagactttgccaaatgcccgggactggagaaagggcaaggtggaggcaatgggaggcaaaattgcccccagttgagaatgattgatctctagggatcctgaagatgtgctgggtgaaagccaattctcttcctaagctgatccaggcacaaaggagagcagaggcatctgcaaaatgaaaactacattcttttaatgatatcactctttcctcttgacccaattttggccagtttttagaaaatcacatcttcctcaagcatctaaactggcagaagagagaagatgccacagtttctgctttgaagggtccagtgaggtttggtatggtcctcacataaagtaaagaggccaaggatatttgtgttttacgttaggtcttggcaaggtaaaaattataagagaagttttatagtgtaccagatttctatcgtgtttttaaaaagaaaataacttattgaatataattgccagacaaggtgaagatagtaaaagtattcaggttgtcaccccaaactgcaaagctgactaaactaatttcaaccttttcctgctaacaaacttcacccttctgtgttttctctccctccatttttgcctgcctgtacaactcaatcctttgtatttactcatgatgaaaggcctacatgcaataaagaaaattaagcaaacctgattttcaaggcttgagtaatttaaaaactatgattttgacattttaagaatgttatgttgaccttgttcttgatcagtcatgagaattaaatgcaggagctttgcaccaaagcaaggcccctagcttaataaagatttaatttatactgcttcctaacattctctttctttttagtctacacagctcacattgtaccttttctcaaagtaatcatgagttataatttaaactgttaaatacacactgccttaatcttgtattttgttgttacattaatcaaggcagtgacaagcaaaattctgttcgaggactcttaacctgccttgcaagaaaagtaatgttcactttttaaatgagccattaaataaatccattgactttttgagtgaaaagcctctccctgtcccaagagctcaaattgcattcaacagttgcttttggaatcccaaagagagcagcaaatagtaggagttatgtctctggaaggcttcttgagttccaaaaggcgatttccttcctctccagaaggaaatcaaagaggaaataaacaggaatcatctgaaagataagaagtaaatgcataactcagtggaaagctagctagctagacagatagaaggaggatacaggctttctagagaaattgggattttaaagcatttatggagtggagaagaaatgactgcaaacaaagccaagtgctaaatatagaaactatggaaataaatagcccatattcccaggatagccttagctttgatgttaagcagcaaagcagatccagagggttcctgtataaagctataaacagaaaagaattaagaatatgctgattgagagaaacaaatgtggtttaccttgggaattacctctgtattgtgctatttatggaataaaagacaataatgtcatagcaagcactttgtataattaaagttctagagtttatagtggaaaaaatatgcagtccattgtcttgaaatgtttatttcatattttgttgtaagggagctttacaaaggtaagtgccttattctgacagtgctagctaactaataaagtaatcaagaacatgaactctgataagcagacctgaaaccaaaccagaaggcagaaaagggaaagaacagactccaattggagctaggtgatatgtctaaaataaatttcatgtgtgcctttcttttatatttccttggatccattttaatggaaatttccattagtggggcaacctatgtaagtaattgatagatatacttaatttatttgctgataagttgagaatatagccatattaatggaattggaattgtcaaaaaatattgttggagttgtccatgaaaatactcagtatttcttttagggctacttataatgttactataacaaccaatgaatggacttaggcctgaaagataaaatgaaacataaagatgatgaattttttaagttaaattttttattgaattccatgaagaaatagctctgaaatctcaggattgctctagtttcaagtggttagaagacaaaaagagcctgaggcaggagaatggcatgaacccgggaggtggagcttgcagtgagccgagatcgtgccactgcactccagcctgggtgacagagcgagactccatctcaaaaaaaagaaaaaaaagaaaaagagcctggcttcttaagaaaccaggtagtaagatggtaaatcatgtaactggagaaaatgattgggagtattttggggaaagatatggttgtgaacactgcaagtttctgttggggaagaggtgtttgtagtcatgactacaaagatgaccctctggaaaagtctaggaagcaggtcataggacaattccagaaagaaggagaattattcaatcagtgactccactgtctttcagcaaatgcttgcctgattactacagaacatgcaacttttgctgatacaaacatgcacgaaggaaggtacttcctctagatagagggaccttgtgagtaattgaccttgtggctattctccccttatacttcccaaagtcccttgcagctagatgtgcctctgagctaaattctggcaaagaggtgtcaacaaaaacctgtgggaatttggggatcttttcttaaaggtggggacatggggtgcttcttccttccctctttgctgcaggctgaaatgtagccaatatgaattgtgttggagcagccctctctatcatgagggagatgctgcatactggggattgagaggttgtcagagagaaaaagctgagacccaaacaattgtgtgatgcaggcctaatggcctggtctcctacctccaggcttctttcacatggaagaaataagtctgtatcctttctaagctgctgctgttttggcctttttagaaacttacagctgagcttaaacttaactcatacacatttactgtggttataagtagaactaaaaatatacttaactcatatttagcagttggttttatttcctcagttcatactgaaactagagcaatgtctttgcttaaaaacagaaatcaaaatcaatcaaacataattgattgaatacagattgcaaagaagtataaaatggaattttggccctcaagtggctttcttcaacatgaagaaacaagacttttaaaaaggtatatgcatatatttgtatatatatatgtatgtatatacacacatacatatatatacacacacacataaatatatacatatctacatatacacacccatgtactacacacatatacatataacaaaacaatattaaaaactccattgtgtaatagttcaatagaatcagtggtgcacagacaataaaatccttgggaattcagaggaaacaactgaaagagatgggagtttgggcagagaacctggttgtgaagattaaaaggaaagattagacaggtgacaagaagaggaaataggacacaatgaatgtattgtcagtaaaatgaaagagttttaggttgatatctcagtatgacatatttacagtcacaattcaatataaagggtcttttgctagcgttcatgtattttatctggtcttaatgaaatgtataagtgaccatgatagacctcactgttccacaggtagtgttttcaggaaaattgtgcaattagtgtctgaatttattctatgaagagtccttacagtttgtctccaacttgcagttctgtggtcaaaggagctgtctgaataattgcagtatagtaattgtgtctacagaggacataagcaaagcattttgcttaagcaaaaacattttgttttgttttggttttttgtttgtttgtttatttttgctggcagcattgctagtcaagactgaaaaattagggcatttaaaatagtggagtaagaatggtggttgttgcaggggagctgagtaagatagagcaatgtgacaagcaggtcttataagactaggtagaagatcaatactctgagaaggagatatggaggggtcagaatggtctgtggaaaaagtactgaatgtggtccagttgaagaggaagagaatcaatatattaaaaaagacccaaatgaaaaaaagaaataaagctgtctttatttgcagatagcataattttctatggagggacaccaaagagtctattaaaaaaaactttctagaacaaataagtgagtaaagcaagatgcaatatcaatgtacaaacgtctattgtttttctatgttccagaaatgaacaattggaacttgaaatttcttttcttcaacttttattttatctggggttcatgcactggatgtgcaggtttgttacacaggtaaatgtgtgctatggtggtttgctgcacagatcaatccatcacctaggtattaagccaagcatccattagctattttttctgatgctctccctcgcctgacccccaccctggataggccccagagtgtggtgtttgccccacagtgtgtccatgtgtactcatcattcagcttccactcataagacagaacatgtggtgtttggttttctgttcctgggttagtttacggaggataaaagctccatctccatccatgtccctgtaaaggacatgatcttgttcctttttatggctgcatagtattccattgtgtatatgtgccacattttcttcatctagcctatcattgatgggcatttgggttgattccatttctttgccattgtaaatagtgctgcagtgaatataggtgtgcatgtatctttgtaacagaatgatttatattcctttgggtgtatacccagtaatgggattgctgagtcaaatggtttttctgcctctagatctttgaggaatcaccacaatgtcttccacaatggttgaaataattgacattaccaccaacagtataaaaatgtggaacttgaaattttaaaaattactgttaaaaatatcaccaaaaaatgaaatacttaggggtaaatttgacaaaatatatcaaggagctgtatgtggaataccagaaaactctgataaaataagttgaagaaagtctaatgagattgggtgatatttcatgttcatggatggaaagatttaacattgtaaagatattaatttttttcacattgaaccacggattcaatgtaatcccagtcacaatcccagcaaactttttttatatgttggcataattgttgcaaaatttatatggtaatgcaaagaactgagattagctaatacaaaactaaaatggaagaataaagttagagaactcatatgatttaagacttactataaagctacaataatcaagaaagcatggtgttggcaaattagatacatagatcaatggaaaataatagcaagcccccatatagacccagataagtatagtaaactgacttttttatgaaagtgcaagaataattcaataaagaaaggatagtcttttcaaaaaatagtgctggagcaattgggtgtccatatgcaaaaatatgaacttagagttcatactttacaaaaaaaattaactcaaaatgagtcatagacatatatgtaaaatgcaaaccaattaaacttctagtagaaaaatagaataaattttgtacaatcttggatttgtggatgagtttttagatacaacaccaaaagcataatccatgaaagaaaattttgataaactataatttgcttaaatttaaaacttttgctatgcagaagacagtattaaaagaatgaaaggaaaagacatagactgggagaaagtatatggaaatcacattgtgataaaagaatagtattctgaatatatagagaacccttaaaacccgacaagaagaaaataaataatgtaaattaatatttggcaaaacatatgaacagatatctcaccaaagaaaacatacaaacataacaaatacccatatgaaaagatgctcaacatcatttgtcataaaggaaatgcaattgaaaaccccaatgaaatatactacacactattaaaatagctaaaattataaaaattgatgatactaagtgttggcaaggatgcacagcaacagtatctcttattcattactaatggggttgcaaaatgggtataatgaaatataatacagtttagcagtttcttataaaactaaacatactcttaccacatgatctagcaattgtgctcctaggtatttacctaacagatttgaatatttatgtcccacaaaaacctgcatgcaaatatttatagaagccttattcttaataacccaaaactggaagccaccacgatatccttcaataggtggacagacaaactgtgatatatacaatggaatattattgagtgataaaaaggaattagctttcaaaccatgcaaagacatgtatgaaccttaaatgcataatgctaagtgatataagtcagtctgaaaaggctgcatcttgtataattccatttatataatattctaaaaaaggcaatgccatagagagggttttcagattagtggttactaggggctgtagaggagattgaaaaggtgaagcacagtgaatctttttaggatagggaaatttcttttgtatggtgctgtaatggtagttactatgcacgtatgaggtactatgcatttattaatatactgtgtactttgaaatgtacaaatgtactatgcatttataaaaatctatagaattttgcagcacaaaaataaactttaatatattcaaatattagaaaattatttaaaacatcaagagaatcccaggatggaaagcagattgtgacaaataatatctatattataaatatagacaacaaccttactgaaggcaataagggaggaagttgctaactgaagtaactggaaatgaatggaatctgtgaaactgaaagcaaaaagaatggttgttaacaactgttaacagttctgagaccagtattcttatatactggaattgaataattagttggatggctgacggtggaagcaaggtttctcactgttggagcaggtagttatagagcaaaggaaaggtgctagaatgatccatgtagacataggctagaattgtgacatcagtgtgaactcatttttagcttaatatacatgcagatggatgaatatagaaagttctgtgtgtatatacatgggtttgtatacatacctgtatttccaaactgggttcttgaagaggacctacaaacaataacactttggtatcaatgagcataaccagccccctgaacttggtttctagtgccgttcttcaataaaaggaactagggctcttggagaaatggctgattctagagctggggaagggaatttacaagattaggctggagcatctaacaatgccaggaagcaagaaagtttctcaaaggaacatatggaaccaactaaaagacttctcaatggtcaaagctggaacaatttaagcaacaaaataaagatgtgatattagattgcaactcaaagtataaaataagtatccataggccacattattataaatcagtcattgaatgaataaataattgggaagaatacacaattctcccatataggataccaaataatttatgtaggagcataactgccttctcttaagtgtgggattcacatagcaacttcctgcaaaaaaagcacaatatggaaagaggggataaagagtaattgtgatgcagaaactgacaaacactgcctcagtcagctgaccaaggataatctcatcagtattaagtcatgttgatagtaggtacctttgacatgatgtgatgaaaatggcattttacctctgtggtctctctcccgaaacccacaacttcagcctaatcatgagaaaaacatcctgtacccatattaagggatattctagaaaatacctgactagtactcctcaaaactgttaaggtcatcaaaagcaaggaatgccaaagagacaccctaagatgacaggtggactaaatgcagtatggtgtcgtgaatgggctcttggcacaggaaaaggacagtaggtcaaaactaaggaatatcaatgaagtatgggccttagttaatattaaagtatcaatattggtatattagttgtatcaaatgtatcatactaatgtaagatattaaccatagggagaactgcctgtgacatacatggaaattctctgtacaaattttctgtaaatctaaaattattctagaatagaaggctatttaaaaaaaaaaaaaagaccaaagctaaacatataatcgtggtggcctggggctggaagtgaaggttagagaatggagagttattgcttaacatgtacagaatttctatttgagaagatgtaaaaggttcctgagatttatggtggtgatggttacacaacaatgtgaatgtacctaatgccactgagttgtatacttaaaaatgattaaaattgtaatttgtatcgtgtattttatcaaagtaaaacaagtatttcaagaaaaaaactcaaagacacagaaaactagagaagagaaacatcagaaggactaaaaacaaaatctaaaagtggaccaacaacaaagcaatgggataggaaggaaaactgcgtaagattcacagggcaaaacacttccattactagaacaccaggaaagaaaacacctgtttagaaatcacagcaaataaattagtactcacggttttctctttacttcgtaatttttaaattgtacacaccctcttccaaaaaccttacaacacaaggcaagaaatacaaaacaaactttttgtttattagtaaattaaatactgtattgaatgtggaaaaacagaacaaaaagtggaggctctgatacactttggccccgaatactggccctctgagcggaggagagttggggaaatcagatgttatattaatggactggcatttagaagccaggcattgaactctgtttattttatatattattttaaccctcacaacagcattatatgctagtactattatttctcactacagagctaacatttgagatcatggttttctgtcaatgacttgaatttagtaacagtgaaaattccatacacataggaatatagcagaattttttcagtaaggctgtaacgtttaagtgaacttagctgatcctacatatattagagaacgcttgctataaattcatgggattctgtctaccaagtcagagaagtggtttaaatgtgttgatgtatctggcgtattagagtctacagtcatgaaatggaaccctagttgtacaactcattagctatgtgctgtcaaattacttaacatgtagagatctcagttttaccatctattaaatggggataaaacaggttctttgcttataacattctttttccttttctaatatcccatgtgcttgtgactttctatgatcagagatagtggtatttgtcttaaaaaaaaaaagaaagaaagaaaaggtcatttaagccccatattatttggagatcataggtacaataaaaaataaatgccagagtttcaatagcttaacacattaaaaagtattcctcatttacttagaagcctagtgtgggtgtttttgatataaggtgattttcttctacctggtgatttagggacttagactctgtccaatctaacagctccagtatctcctagggtctctctgtcctctttaaaaaggacacaggagaaagaaaaagacctgaaatgaccctcgtctcttccattaaccttccatttgtgagaactattcatatgaccctccttaaatgcaagcaaagggtgatgtgaaatgtggctgtattcaggcagcaatttccctgtaattctttgaactgtgtaaggcaaagtgcaaagtttggtggcgaatgagcaacctttgccttaagctctgtgcgagcccagtattgctgaactgtgctaacccactcacctgtatggagagaagagtagcaccattatagtaaggactcctgcagtaatcaccaagtataatgggggcacttaaccctcagcttttttgcaccttaaatggtttaataataattgcaacaaaaagtatttataaagcattcgggaatgcttataagggattaaagtaatattaaagaaatcactagagtctcagcattaaatgatttttaatgcaacaaaatctcatcatactgtattttttcttcttagctttaaaaatagacctgcagaatagatatggtataaagtgagactccatagtgtccagaattcttttctttgtatttgtactgaaattctctctctcttttccagtgtatcaacttttagttatatattttgttcaaaaataacatctgatcatcataaacatcaattatttaaataggataacatgcttcttctgagtgctttaaagtaaacttgagtgtttataagtaagggaattattaagaagaaaccctggtatatccacaagataaatgttaccagtctctaagagtgcgtctcagtggttctcaaacttaaaagtatatcagaatcacctgtaggatttgttataatgcagattgctaggtcccaacctctggagttttcagttcagaaagtctgggatgtgggccaggaatttgtgtttctagcgagtaaccagatgatgtgatgctgctggtccagggaccatactttgaaaaccactgatttttctataaaatgatgctgaagaaggtaaggaggaaggtatcaaatctacgcggtttctctgaggttggactacttgatgtgtcccagcttttatgtttaaaaaaaaataatgccgaaagacatacagtgcttaagactcaggttaatttaattccataatcatacggcataatagcaccaattttggtacatagagtcttctgtacttaattttgactgacccacatagagcaaatgtgatttatctgacttgaaattgaaaacccaaataagctaggttgtgaaacacagtaggtttttacgatggggcctataaggagacctatgaattattagagggatagcagtggttaggctaaaggtatacagagaatacgttgcaaagatattaaggaaaataagaaaattatggaagactttaaggaaaagcactaaatatgagttcagggcctgagctaagtggattttcaaaaaaatttcctgggtatttactttcttaatacagaggaagtaatttggaggaagatttatttttaggttttactttcatctgagcaagaagaaatatattgtgcaataatgaaaaagcgatctatcttcttgggtgctcaaaacctatgttaaggatttatgaattatttattaagaaaaattatacacccagggatggtgaccctggtcaatatttaagcttcaaaaaagataatgaaattcagtttttctaaactgtagaggataaagtgttttatcataacattacaaattgtggaatgaatgaataaaagtcacagtgggttcttttttgaaagtctggggctacccggaatcagcatataggacccaacttcaaaaggtgaacaatgatattaaccaataatgtgtttctttgaggaaatgatctgaagcaaaaagatacctcacagaccagggaggtaatattcaagcaactaaagaagctaaggactatttcatatgactatcttgcccttggtgagaaatcctaatacagtgattttttttctccactatatttacaaaggaagcataaaaataagaatgttggctgggtgtggtggcttacacctgtaatcccagcactctgggggggccgagcgaggaggatcccttgagcccaggagttcaagatcagcctgagcaacatagtgagaccttgtctttacaaaataaaaaaggaaaaaaagaaagaaaaaagaaaaaaatgagaatgtctggatttgaaggaagaaaaggattcaaagaaattctgccctgcgttctgctgatggcagttttatttgagaactcttgcactgtcaaatgtttcttagttcatcgcccaatttaatatttcagaaaagtcatccaaggactgttttcttttgtggttttctttctggcagcattctatggcttctctgttcttggagtgttcttctgccttgacaaggtaaagttcatgcctaagcatgtgcagaaactcaaggtcaagtgcaccactgagcaccttcagagtgaatttttaggggataatgttgtcacaactgtcttcatcatcaaacagcaagccttcatgataggcctgccagggaggtggccctgccagcctgctgcctcttgtccctttcccagtttacactgttatttctccatcttgccctgacttttgcccaataacagcaagcctttgggttgaacctagcatacctgctttccttgtactccagggccataagcttgcagagctaccgtggtggcatggcccatggtttgtcctgccccaacttttttgtttttgagacagagtctcactctgtcgcccaggctggagtgcaatggcatgatctcggctcattgcaacctccgcctcccgggttcgagcgattcttccacgtcagcctcccgagtagctgggattccaggcaccctccaacatgcccggctaattatttttgtatttttgtacagatggggtttcaccatgttggccaggctagtcttgaactcctgacctcaggtgatccacccaccttggcctccccaagtgctgggattacaggcgtgagccaccgagcccggcgtgtcctaccctgccccatcttgcttccttcctcctctccctttattccttccttccgttctctttagaaatatttttgatatgtaacagaaaaatatagaacataataggaaaaagtccctcttaaatgttttcgcttttattttttgcattatcccaataacctgtttcatttatgtactttgtcttcagggtgcaattgtatgcaatatgtttggattctctgccacttgcactaacattctcttgccttaatgctgtctcttcttatctactcattttctgtttctcatcctttaacttttttaaagattctgtgcttctcaccaacatattgcaataaactgcactgtgcttccacctttcaggctttttaatgaagggagtaaatttaagaattaacttgtttctcatgaaggtcaagtcaaggatgtgttggaagaagacagatgtcttctattagttgttcttctgtattttgtttcaacctactgttctgaagcagcaatagtagtaaacataaggccttgtaaaagagtttttacacaattttttttttaaatctgtccccatcccacttttggtctgacagtgattgctttttacttactccctctctgttcataaagaggtagtaatactaaattaatagtgtttgtgaaaattcctagaaaaaatgttattcacataggatctttttaaaaattatccttattcatttttaagtgaggttttaatgaaatgataaaatgaattatgtttatcaactttggagtagagctttatatattctgttatggatagtttttttattattttaatgaaaggaaagtcagagtagggggtagaaaatagaataaacctttaccaagaagaaagtaaaataaagagaatatgaacatatttctttttagctatgggtatgacaaaaatgaactctgatttggagattaggtaaactgatgtttttcatagcttttatttatttatttttagtaaggaatatttcttttttaaaatcaggcactgtctctcacgtgatgatgagaaaaagcttttgggaaaaccatttgcacgttagattacagggtatttatgcatatgttttcccagtagtactcactatattttaaaacctgattaagatgacataagataaaatgtggcgtattgtgactgagaacccctagtctcgaatgctcatatttagtgggtataatgatgaaaactattttcgaggacatttttgaaagattccaaaaacatacagaaatatatctaaagccaaaaaagtaagtaatataaaaatatgagtttaaaaatagtaatatgtgattcagaataatttcaagtttaacgttattttctaagttgattatttgcaaatgatagctatttggatcctgttctctgaacaaacccagatgcaaggggttgtatacaagtgatttattaaggaagctacttccaggagacatcagtaagagagtggaggaagcaagacatggatggagaagagttaagtaagggtgagctttcaggtgaagtcccaacctcaacctaagctactgaaagctgcagagcacaaattacacctcgagttgcttctcctgcatctgtcagacatgaactatcagctctctggggagatctagcatctcaggcacttcctgctctctacacatctgagtgaagtagctccaagaagccaaaggtagtcaaaggctgcaagtgtcacttgtttggaataaagctgatagacgctgggggatgggtgtctagccagtaagggagcctagcagggaaccaggctagtatcaatagaggttcctgcaggagctttaggcaaacttcctgagtaattggaaaatggctctacattgattttttttcaatcattcatagttcttaatatgaacagctagcttcgttttgtgtacatacattagtgttgagattgatcaacagtcgaatgaaaaggagagttcctttctggtaaaatttacgcacttaggcaaaacctttgggctgatttattgattgactcagtgaatgttcttctcaggaaaattcattaagcatgatgttcccttttagacatatccagctcctacccccacaaattagcatcggaaaagatttggttgaattccgtctgtcttgccagaaagccaaaagcaatgttaagaagcaaatcttctttgaaagggaggggaaaaaagaccacacttgtcaacttaaaatatctcattttggaaaatagattaactcattacatattcacaatgtcttatgagaggaaaaggtcatcaaaatgcaaacctttggcagaaaaaaaattgtgatacattttggaataaataactggagaaaatgagactatccagatggatataaccaatcagctactaaggtaaagcaaggataaatgccgtctatctatacttcagaaaatatggaagtcaccagatatgccatactgtgtgatgagagagaaaagaaaatacgttggttgagaaaatacgttggttactcactcaaatgtatcatgcacagggctgaatcaaaacatgtggaaatcagccgagcatttttagaacctctccttgacacagtctggcctctagggcccaatgtggaaattgctgctttaatctacagtgatattagagctactgataagcacagtagtctgaagaagacttctcagttttattagtagttttctcattgctcttagaattctgatgcagctactttataactggatgtaggaagcctgtccaagtgtcagaatgccctacccgttctagacctaattagccttctctgtgggcagccattgtcttcatttaatatctagggcagagattctcaaacttcagattgcatctgaatcactgggaggtgaatcacccagcacagattgtcgggccaccccagagtttctaatttagtaggcctagagttgaaccagagaatttgcatttttcacttgttcccaaatgatgatgatgccataggtcaaaggaccacacttggagaaccactggtgtggagaaatgaaggcatttaagtcctataagcagataagtgatggattcaaatattatattaaggtaagattgagggagtagtttgcactgccagttaaaaaaacttggctggctgttcagccacagtgaaataggtgtaaaccagagataacattttagatgattcaaaggggaaatctggctacatttatatcatctggagttttcaagtggaaacagcttgtttgcctgatgaatctatatcattccatatttcttatcaaaagaccttttatgaaaatcagattctatgctcacccaaaatattcaggaagatagtttttagcacttatgaaactatttgcaaaatgatggatgctgtttctagttaatctgattagtctgaaatgaggaatttagcttatcacaggcagtaatagaaaattgtaacaatgccatctttatcatcatagttgtgattttttttaactctgagttctgaatacatgcaacatcattcattcttcatccataaagatgtggagaattcctctgtgagaagcctgtaatatataagaactggaaaaataaaacacgtgctataaagagccaatatatttctgaaattattcatctttaaatatatatagattatccatggtgattatggaactttttctcaggtttttaatgtcaacctaataagttgacatctcgttaaaatgaaggcagttactagcatgttaaatctgacctgtttttcattcatcatttgaaagaaattacaaaaatatatctcttaatataatgtttcctagaatccagaagcaagtgtggcagtttcttccctcagagtcatagatgcatgcaactataccataaatactgttacaattaagttttattcattttacctcttaataaagccgtggtgctatacatataattttatgtttagctgcatttaactttcaactttggaagtgttttactcttagatgagcgtgtaggagtttctaaggttgctgaagaaggaagtaagaatgagaatatttggctattgcacaaccagccaccaaactatctcacctggcaatctgcaaggaataaattaactgcatatctgctgatatagttcacattgccttgtgcagacacagcctctgaaaactagtgttatatttatttatcatgattattttttcatatacgtgaaaaaagacttaagtggttttctttcatttatgttacacaatactcctgctaccttatcaatatccaaaatttttagaaaaaagtaagtttggggatatgtggattactttttctattatgtacatagggtcaatgatcctgggcaattaacatattttctctgggacttagtttcctcatctgtgttctctttctgttcccagttactatgattctattatagtaattgtttctgtttgggcacattcaataatggtgacagcattgcagtcatttttatgcagggtgggtggagtgccaagatacgtaaattcattttcattcctttttaattagttgcattagaacttggaaacaatggggttagtgtattagttatctattgcttcataacagactaccacaacttaatggcttaaaacaacaaacatttattatctcacagtttcagtgggtcagggtctcacctgcttagggtatcctaaggctgaaatcaagatgtctcctgggctgtgttctcatctggagctcaaattcctcttccaagctcatttaggttgttgccagaattcagttccttgtggtggtagaactgatgctcttatctcctggaggtcttcttctccatagtcagtacacagcacagccagcagattagtgtctctgctgcttcaagtctcttgcttctaaaccctcttttgaatggcctacccaagatatctctcttttggctaactttatgttgtctgattgggaaccttaattacacctcaaaattcactcactcttgctgtattacataacataatggtgggagtgatagcccagcacctttgccatattgtattggttagaagacagctgcaggtccctctcacactcagagggaggggattacacaaaggcatggaaaccaggagacccacatgagtgtggccatcttagagttctgcccaccaaaggtaggcaaaaatgcagagatttgtgaggaaattgtgcagttgaccaacagtagtcaatagtagtcataactatctctgttagttttctcatctgcaaaacagagaaatatgataattaggtgacagtattattgcaaagactaatgagataatacatgcaaattttgttttacaattcttggtatgctggttctccattataaatacatacgattattattgctgttattattaaggatattatttgactttgccacctttagtgtgggaacctttaatctcatcaataataatttctcagtttttattttatttgtaccgagcagactctttagattaaaaagtgcattaagagagattgtctgggtttttttggttcggtatcttcctgtatactgaccttggctcccggaagaatgcatgaactccagaccttggtggattccttatctccctaggacaggcaatgggacaatgaaggaagcaaggaaataaattaaaaatgaaaagttatcttccacattatctgccgcattcatatacttgccaataacattgggccaaatactttggaagtaggtccagggataacattcagactggagaatggaaccgataatatccgcaggcattggatcacccactttttccccaatttatgctatgatatttatgagagcatgagagcatggaaggtaattccaactgctgtattaatgaactttcagtgtccctaggttgcttgcaaaaataaggcatcttgttggttttctgggtaaagatgagtctgacttgtattttatgtactgtgttcctgttaggtccaaagtctgaaatacctaacatcttcagcagggtgtcattcattcataaaccaggatgaaatacagcctctgtgctgaactttatgtcaaacactatacaaatcaggataaaagtccaaggtctttttgtcgagggattcacaccaagtggtgaaaccccatgtcaattgacagttacaatacaacctgtaacacatgaacgttttcattgcttgtcccatttcaaaggttgatcctatttttcatttacctataacacataaaagtgaaaattagtttctctagaagttttctctattacttaggttttaagtttttatgaagtagctatagagttccaggttttcagatctttttctttttctttgtttatttacattccttgtgtttcttctagatgctttacctaacaacttttaacttttctgctaggatctttcccctttcacttagaatgggaaatcttgcaagcataagaatttctatatattcagtactcgctgcttgctaagtggagatcttaatttaatatttcagttggtttagcagcagccgaacgagggagatgttgctggcatctgcacctgtgtttgacagatgaggatacaaggcatgcatgagcatctgtagcaacttgtttaatgctacattgataacaagtgataatttgagggaagaacttacattttctgcctcctacttctatgaaatttgcactatattaaatctaagtgtgtttaaataaagaaagccagatgtgtcatctttctcttttctctgccttggttcttattgatgacctatacctctcatttccattggtgtttcttactgtgggtctccactgaaagttgtggaaataaagatgaaaatcatgcctaggaaacaaaggaaaagagagaccaggtggcagacggtgcagagatttctttgagaggtacattgcacagatttttcaccccctcagaagtggaataaagttaaggaacaaagaattgagtctaagtccatctgcttcttgttaaatgaaaactatttgttaaaatactctaaaatcatttttttaaaaaaattgtgcattttaaggaggtttggcagtcagtaaaatatattaatgtattctacttttggtaaatcaaaatagaccaacttaatgactataccacacatgtatgtggagatatacataatcacaatgcacacacccagccattaatatcttctctgtgaaatgtttatgactgtaattgctgttctgattatatactgtgtgaacctgaaacacattattatattgggtgactaatggaattcaataacaatgcacagaaattgggattctggaaagagttgagttttaaactgtatttcctcctcagtttgaagtggatttcatgtctcatctaccacacagtatgcttatggctgatggattgaaatctctctgctaaatagtaaacaaccaagacaattcagtcttctcttagcttgcctgctttctcgtcactcattcaaaatatttttgttaaatacccaaaacccattaattagtaataatgggttttgagtattttgttaaatacccaatacctcagtttgtttaagagtttaagagtttctgttttccagctttgtggaattcattatttctttacgactttctttgaaagagagatcacagggtatatatgtggaaaacttgggtttgagtgaagaccctaaaattaattattcatgtattcagtcaataactttaccacactaacaatgcacagaaattgggattctggaaagagctgagttttaaattgtatttcttcctgagtttgataattaacatcttcagcagggtgtcgttcattcacaaaccaggatgaaatacagcctgtgtgctgaactttatgttaaacactgtacaaacagagataaaagtccaaggtcttttgtcgagggattcacaccaagtggtgaaaccccatgtcaatagacagttacaatattattgtaatattactgttaattcacttttatccatgctgttaattcatttttatccatactgacaaaaagagagggcatatccatcaatgcatcagtggatgcatctgaggtcctaagagtgtgatctccaagctttgcagggtgtcattaatggccttggaaataaagggttcttttagtacatgcctcgtttaatgattccggtaggttcttttagtacatgcctcctttaatgattccggtaggttatgtgactttaggcacttcaattcctttctcattgttggatggacttcaaggttagagagaacaaattttaatttctttattccacttttctaaagatgtatctaatgttatgaagtataatgcaaaggttctatgggagaacatctgtgacaaacaaaacgatttcaattgttgcttgagtttctgaacacctaggacatttgcttggatagaatatgatttaatcctaaagagaaattattaaaatagcagtcgatggcatttgtcattcaatagttttttcttcagctaactctcaccactaggcacacttttacattcagtaagtgtaatatttttatttgaaagttcccaatataaagaaatgatagttatagattcttcatattaacaaaagtaatgtattgctttatcaatgatattcacatgaaaggccttataacaacatgagtgagtatataattagtgcttctcaaagtgtggtcattggaccagcaacgtcagcatcacctggaggtttatttgagatgcagattctcaggcctgcctcagactcacggaatcagaaagtctgacaggtgacacggagcaaatctgtattttactaagcttttcaggtgactgtaatgcaggctacagttggagagccactgatacggaaggtatgatcatacccatttaatagatgaaaaaattgatgctcagtgtggtaaagttattgactaaatacatgaataattaattttaaggtcctcactcaaacccaagttttctgcaatatacactctgtagtctctctctcaaagaaaggagtaaagaaataatgaattccacaaagctggaaaacagaaactcttaaactgaggaagggcagaaagggaccatttcactgctttattgtaatgagttgttaaaactattgtcacgagaaaattaacctagaaaaagttttaatgatacaagaaacacttttgtggtcatgcattgggttcctcattttctttttagtggcagagagaaagggatgcagttaaactccagaggggtggctgtggtatgttaatagaagtgggagacactatttgaatcatcgctttgtagccaaatgagttcatggacggcatttccacccaggtcttccccacgccacattacccttgatgacagtgccctgcggtggttttcatgcacacagttggcgttaactacccttccgtggcttggggaatgaatcctggaagtggaatacagagttcattatctgtaatgcaaaagtctatataatgatgcctgctaagatctagttctttgttaattcaatttgggctttgcgtatataatcaaacaagttatgtttaagtctattgtttcttcaattgggaggaatttccttaaatagaaaatattacgggccgggcacggtggctcatgcctgcaatcccagcactttgggagcccgaggcgagtggatcacttgaggtctggagtttgagaccagcctggccaacatagcaaaatgccgtatgtactaaaaatacaaaaattagcagagcattgtggtgtgtgcctgtaatttcagctactcgagggctgaggcacgagaatcacttgaacccgggaggtagaagttgcagtgagttgagattgcaccactgcactttagcctgggtgatggagtgagactctgtctctcaaaaaaaaaaaaaaaaaaaaaagaaaaagaaaaaataaaagaaaatattactattgattaggtaaaaatactgtgtgtgagagatatatttttatcctatatagatgtaaaacatcatgcaacatatatggaaaattacatcaaatgtaaatgttagtgttttataaataattataaagagaacacccatgtaatgaccactaaatcccaaagtgattgttgctaatgctccatatacctctgtgacatatcctaagtgggttgtagttttctgcacacaattcctgcttctgtgagtttctacccgcaatttcctctctctgaaaccaccacccaccctcccaccccgatcacacagttataaggctggcaaactctgtctcatccttgtgtactggctgaaatcatgccatagctctctgtagccaatgtctgtagggcactttgaaatatttcctttagcatataatatttgacttgcttgtgaactcatcgaaactgggatcttatctttgtatgttttagtttctcagtactagtgtatacctgatacattgtaggcattcaataaataatgctccagtgaattaattactggcattttcacttggataaacccctcaaaccaacatctccagaatgcactatcattttgcccaaacttctgagtctcagtgtaggaaaggtggaaactgcagcgtgttttatgacttccctctttccttcagtcagttcctccattgccatctctctcctctttcttccaattacttaccttcattttgtctctcatctttcacctctcagatctccacttatttcccatcttctagattaaacttcttcaagcttgattcccttactgtttctcctcttccagcaaatattttggttgtcattgctgtagagatgaagaaacctggacatatgcttgacttactcatgtctggtttttccaccgtttcttcacagagggttctataatgtgcattttctgaagtgaagcattgaacatggttgagaccattgttttctaacactcataaggtaacctccaatattgtggatggtgtggccttcggggaactgtggcaccagtcactctgtattgcaaattccttgctgggttgccacctgtcacaccccaggggtttgggagaatttccacagggtcagacacagcatgaaatgggctaaggaaccctctaaaatggggaaaatgaaacttacaaggtcagagtgagcaagagcagagacccactgtttcctgtccacccttcatctcacagagaggtgtgtcaggagttctgttggaccttctgtgtgggtttgcattcgaggagtgagacttcacctttaatttggcctttactacaaggcaatcttaggtgcagaaaaataatcagaccagtttgcaccagacatttggaactggcagcagctgtttgaagaagttgactaagagcaaaaggtgctggttcttagggagcttggcctttaagaagttacagccactcctatccagaggttctattggcagctgaattaggatgcagtgcctccttccgggagaaggggattcgatgctccatccaacttgctcattgcccaggaatcatagttaggacatctggagtcactttaagacaactgctcactgcaccacagtcctacctggctggtggtagagtccactgtctaatgcagcaacctgtgtgtgtcacaaacctcatggctcagtctccttagccagacatttagggtttccattctttggccatattcctttctgatgtcatctctcatgacttcttgtcacatgttctgtggcctagccaatggaatattgaatgtcctcccacgtgaatccgcttccatccttctacaataccactgtacctgcacctttgcagttcttccctcctggatgcttctctatccttctccctacctcctttccccgcaatgttctctgtctctaagtgtctaaaggccacgaacacctcaaggttcagccaaaacctctggccctttctcatctaggcatttgctcatattttcccctccaactgggaggaacccctccccaacttctttttttccaagcttaatgatttctcataaacttttctctgagcccctaggaaaaaaactgtgttttctttgctgccccccaaccatagtagtcaactttaaaattggcattaacacattcccccttgtcttacacatatacatttctttacactcctatttgatgacaggtccatccaggaaagcaatcatatcttctatgccttattccctagagtaacttgtgtattacaggtgttcaatgatgggtaatgattaagtgaaaagatcagggcatgaggtatgtgtgcaaaaggctgggggctgtcagaggcagattcgtatctctgccttggccagataagctgggtatgtatgtgagccgatgggagcatcccactccgtcctcctccctaatctttctctctaccgacataccctcataccctcacctacgctcagtgactcccaggattatattcaaaagtaagaacaagaagacctgattcatcatgatttaggaatggcttgtaggatagactggggacataaccacacactttttgctttcaaaatgtataactgagcagttagcagttagctgtcttttgtttccaacctaattcaattgagaagtgatataagaggaaagaaatatcccaactgcagagaagtcttcagtcaagtctcaagataatttttttaagtgatgtcaatgacataaaacaaagaggaaaggtctgtgtcgttgcttaacgatttcacgtttttgccttccaggagacagagctactggatctcagccttgtcaaagatgccagatgtgggagacacgccaaagctcccaaggtaggaggttgagtgttgtgcatgcaccagatgctgccttgattgtttggctgtgtcacaatatcaattaattgccccaattaaaagtttctatgttatagatgttgtaaaacacaatagccagtatgccctaaacactttcacttttattaaaagacggaaacaatgaacaaatatgtgggctcttggacagaggggcttgctttatgtcctctaattttgcctttgtttgaaaaaaaaagacaacgacaacaatgcccaagttactgggtaattctaaatgattaaaaagtacttgaaattatttgaaaaaatctttgaacctcgtaaacatatgggaactaaccgttagacatgatgaatagaactcccatatagctgaaatgctctgcaattgaaatgattccatccacaatgccaaaaggtgtatagtcttaattctgcaaatgttactagtaaagatcagcatactttgggatgaattgtgtgcagtgtcatttgttttggtttgaaaaacttactgaagaaatattcaaagaagtgtttgcagtctgtttattttttgaagataatttttaaatattggatgaagaacataattttttaagcttagatgatctggtaggatatagtagcaggatatgttgtcttgccatcaaagttaaaagctattcttcattttatttaaaatttagtactttacatacttcatttctggcagagagggtattggcaaacatagaagtacagttgccatttaggagctcaatgcgtctttccatacttgatataaaactagctattttctatttgagtgtcttcccacaacttttgttttatcttttaaaagtcaaaattctttctctgacattaaaatgatctgttgctttggagatgcaagaaaaaaaaatcacctggaataattattcttcagaggcgtaaaaaggcagtaggtgccagcatattctatgacacagcaaacacacggctgctgggttttttaattttttaatttttattttatttgctgaaagggttaaaatgatctatggtaaaatgtaaaaaacaaagatttttgaaagaaaaattagaactgtattcaagaaggcttctataagtgtttcatatgaaactaatctgttatttacatttatctccttagtaacatggaatttcaatagtttagcctctcagttttgtatcagacttactataattaatgctttgttgatgattcaaaattgctcacagtttttagtataggaaagaatattttttcttcttcccccaacaacatttcagccaaatttcatataagcctgttagttccaagaactatattgataatgcagctatgaaatttatctttgaacctaagtttattggcctaacttgcaatttcaatatcgatattagttttaaagacagttgccgacactgcatcagagccctgtttgtccccaggcattgggagtcaaagtgaattctgctgccacatggagggtttctttcaggcttgaatctgtctcttttattgcggtacacagcttgcttatcagttaagtgtttcgtttatggatgtggtttgataaatgtctactgaacagtgacaaatgaacagcagtagggcctgtactgtgctcagctgataaaccactgttagatcctcaaatgcttctcgtgaggatggatttttaacacttagaatactctgactttgtcagcttttctccatcagctctttcttggagggactgattacttcctctttgaattatctatgctcctggcttcctttttttccctcctatttattgctgatgttcaagaacctcactctcctctaatattttcaaagcctggttctattaaacattacctgtgtggctttcctgagactccagcttcttccttgttggctaaatggtgaagataatgataataataagtacttgaaatggttgctataaggattaaatgaaataattcattaggaaacctttagcacaggagttctcaaatttaattgctcatggaattacctgggaaactttcaaaaatgctgatgtgtgttttccgcctccagaaatgctggtaccataagaatcaaattgatacaggtgtggtgtgggcatgatggatttgaaaaacaaatttgcagcaaaatttgagcaccactgccttaacttactcttggtgtacaataagtacttactaaatattagccaatattgttggtagtaacattgttgcttttgttatcactaaaaaattcaagtcagaattgtagaaagccacttttcatttcactcacttaatttggaaatgtttatgtcagcaaaagggatcagaggaggggcttatctcaaagggggttgtggattgacaggcaagaaagaagttgctattactatcagtttaaaatcttcaaatttccagagaaaacctcagctcaaattggacaaataaaaatataatttattgaaaatgactggaatgtattgaaaatttcagcggaattgccaggttcaggtgaagtttcattccactgctcagttaatgtcaccaaggactaggtgcctctttttttcatcagtatgccatgcaaggttctggtaggggttctgatatggcttggctgtgtccccacccaaaatctcatcttgaattgtaattcccatcatccccatgtgtcgagggagagaccaggtggaggtaattgaatcatgggggcagttcccatgctgttctcgtgaaagtgagtgagttctcacgagatctgatggttttataagtgtttggtagttcctcctgagttcactctctcctgcttccttgtgaagaagatgcctgcctccccgtcgtcttccagcatgattgtaagtttcctgaggcctccccagccatgcaaaactgtgagtcagttaaacctctttgttttgtaaactaccatcttgggaagttctttatagcagtgtgagaacggactattaccgggtccttttccatcttcaggttccccttggatgctaccctctgcacaccacccttggcagctcctggcctccccacctaacagtgtcatatggggtggcccaaaagagagactagctgcctatcagagaattgtatcaggattacagtataactaccttgtagaagaaggtgtagggcctgcaagaggaaaactagaccattgagttggttagaacaaaagcagcaacaggacttagagtagattaaaagtataaagataccaggataaagtgaagaaagcttggaaactggggacagaaaggcaatgtaacaaaaggacagattgagtgcaagactttctgcgggggcttatagaccataaaggaaggaagaacatttgtgaagcagatatttatcaaaatacccaggcaccccacaaatatttatctctatattcatattatttttgttttttacagcatctcattacataaaaattcaagatctggttgaaaatgaactgttttttgtgcctgctgtgatttgaaataacatttacaggaaatggaaaagcttccatgtgttaccctgtttatgaatttaaatgtcaacccccaacacaatacatgaaattccagatcttcttttctgtatataacctttgttcaagttgccagttttaaaatttcacattagagagaacttgggagatctttatccaaatgtaataaccaaaagaaaaacactgtatcctttgaaatctaaaaggtgcttactttttttcttgctctctctctccctccttccggccctcccaggtttgtagagcacacgtaagggcaagatgctgtggtatatatatcttgtctgtgctatgtacatgtactttctgggtcgtcacttcaaaaagatctttgcttttaaaaaaagtgtttatcactgcggcctctgatctattagtagttcctgacccatcagatccattcagtggctcatgtgcagctttcataaaataaaataaacttgataagagtggaaaataatcttgtcttgtacagaaaaagttgttttttgaaacttttttcatgtatgtgactgtatgttctgagtcacagcataaagtgtaatttttactgtgggcaatacatatcggagaagttttaaaaaggatgctgaacaagatcatttcttcagcctcatgattctcagcatgtattgagtgcttaggggtatggaaaagtggggaaagtggagatgtgggttcaagtgccagctttgccattaacaggcgtaaggaagttgtgctgtctgctggcatctctacttcctcatctatgaaatggggcatgggatacatggttttaggtatgtaagttccgttagcccttgattccagcttttaaattgagaagttaaacacccatgactttccaccttacagattgtaaaactgatgttgaataagtttacataacctgaaacttcttacctccttcatcatgcaaaccaagtgaaccaaaaaaaaaaaaaaaaaaaaaggtcacactctagccaaggtaaggtactatgccaacaaaaaggattaaagacttgtgtcaagcttctttatgtgtggcttctcaaaagcattctaggattgcttttggacaccacagggagcgacctcagggtcacagaggctctcccaactttagtacatgaaaactgtgtgctgccaacttccagctctcaagaatgcacgcagcaatgtcattgaaaaatatttttatagttacacaaaataaactgcttgtcatgctgatctgacaactagtttattctattggtaaagggcagttatttcagatatgtagtattaattttaatgtagattctttgtaaatatctaggccgcaattaaattctaggttgtatgtagtatcaccagaatcacataaggtagattagagtaaaatcaaattttaaaaattgattaggcttttctttcctaatctctacataaacatgatagcttttttacttcattctttattgattcattgattgattgatattcaatgacagaagtcattgagtgactctttctgccaggtactgttacaggtgctggaaaacagcaatgaacaaaaagacaaacagctatgctgtcatatagcattttatttaagagtgagaaagtggtggtagttttaaactgggtcttaaaaaagaaaagaaatcagccgggcgcagtggctcacgcctgtaatcccagcactttgggtggctgaggcgggcggatcacgaggtcaggagatcgagaccatcctggctaacacagtgaaaccccgtctctactaaaaatacaaaaaattagctgggcatggtggcaggcgcctgtagtcccagctactcaggaggctgaggcaggagaatggcatgaacctgggaggcagagattgcagtgagccaagatcacaccactgccctccagcctgggcgacagagcgagactccatctcaaaaaaaaaaaagaaaaagaaagagaaagagaaatccctgatttgctgtgttggctgacttcctttgggcaactatttccatggaggcaaatttcaagctaccaacctgatgtcattgaatgaagagttggaaggcaatacacaccatgtccagtagacctatcagcaggttccagcacctcatggggtaggggaaacagataacagataagtcccactgagaagcataaagcgggatcggagacctgagaaaatgagtgctgggaaggggtctgctgctttacagagccatagtggggaaaggtgtcttgataggaggcagttatatgagtagagacatgaacttagtgagggagagcattcctctttgccggggatacagcaagagcaaagcatatttcaggaatagaggaaggccaatgtggctactgtagagttcagaccttttaggccatgaaaatgacttgggcttttcttctgatggaagagggaaggcttctgaaagttctgagcacagaagtgatgggatctgagcttttgaaagttccactggtggctgttgggagtaaactacaaaagagagaagcaagcagaccaactaaatggctgctgcagatatcctggggtgatgatgataactttgcctgaggtggtagctagagaggtggtgaacaaagtgacataatctgaatatgttttaagatagagacacagggtttgataatgtattggatgtgaagtatgagcaaaagaaaagattctagaacaactattagtgttttggcccagaaaattgggagaattgggttgccatgtcctcagataagaaggaaggaagagcatatttaaacagaaaaaaatccagaatttggttctggatatttaaatgttgagatgcctgctagacttttacctgataatgtcaggacagttagacacaagtctggggttcagggaagatgttggccctggagatacaaatgtgggcatttgaggctcaaatcctgggtgaggtctcttaaggaatgtaggtgtaaaagaaagaggtttgagatctgagacatgggattgccagcatttagactttgaggagacttggaggaaacagcaaaagagactgagaatggtatatacgtaaaagaatagaaggcaggaacttgaacagacacttgtgtaccaacgtccatcgatggatgagtggatatacaaaatgtcgcatacacttacaatggaatattgtttagccctaaaacagaatgaaattttgacacatgctacaacctgagggaaccttgaagacattatgctgagtgaaataagccagacataaaaggacaaatatagtatgactctgttcttatatgaggtacaggcataccgcagcagcattgcagatttggttccggaacaacacaatacagtgaatattgaaaaaacataagtaatacacattttttggtttcccactgcatgtaaaagttatgattacactatactgtagtccattacatgtacaatagctttatgtcttaaaaatcagttatttttagacataattttacaattaaattaaataaaaaatattttattggtaaaacatgctaatgatcatctgagtcttcagcaagtcacagagggtcttgcctcgatatcaaaggctgctggccattcagggtagtgattgctgaagattagggtagtggtgacaatttcttaaaataagacaacagtgaagtttgcaacatcagttgactcttcattgcatgaaagatttttctgtaacatgaaatcctgtttgatattttacccacagtagaacagtagaactactttcaaaattggaatccatcctctcaaaccctgcttctgttttagcaactaagtttatataatattctaaatcttttgttgtcgtttcaacactgttcagtgtatcttcaccaggagtagattccatttcaagaaacgactttctttgctcattcataaaagtaaccccttgtctgttcaagttttatttatttatttttacttcttattttgttttatgtttttaattttactttaatttctcggatacatgtgcagaacatgcaggtttgttacataggtatacgcatgccatggtggtttgctatgtctattgactcgtcctgtaagttccctcctctcacctcccccaccccccaacaggccctggtttgtgacattcccctccctgtgtccacatgttctcattgttcaactcccacttatgagtgagaacatgcagtgtttgattttctgttcctgtgttagtttgctgaggataatggcttccaacttcatccatgtccctgcaaaagacattatctcattactttttatggctgcatagtattccatggtttatatgtaccacattttctttatccagtctatcattgatgggtgtttgggttggttccctaactttgctattgtaagtagtgctgcaataaacatatgtgtgcatgcgtctttataatagaatgacttatattcctctggctgtatacccagtaatggaattgctgggtcaaatggtgtttctggttctagatccatgaggaatcaccatactgtcttccacaatggttgatccaatttacattcccaccaacagtataaaagcattcctatttctccacagcctcaccagcatctattgtttcttcactttttaataatcacgattctgactggcatgagatggaatcttactgtggttttgatttgcatttctctaatgatcagtgatgttgagctttttttcatatgtttcttggctgcataaatgtcttcttttggaaagtgtctgttcatatcctttgcccactttttgatggtggtatttgttttgttttgttttttttcttgtaaatttgtttaagttccttgtaaattctggatattagacctttgtcagatcggttgattgcaaacattttctcccattctgtaggttgcctgttcactctgatgatagtttcttttgctgtacagaagctctttagtttagttagatcccatttgtcaagcttggcttttgttgcaattgcttttggcatatttgtcatgaagtctttgcacatacctatgtcctgaatggcattgcctagattttcttccagggatttttatggttttgggttttacatttaagtctttaatccatcttgagttaatttttgtataaggtaggaggaagggatcaagtttcagtttcctgcacatggctagccagttttcccagcaccatttatttaataggagatcctttccccattgtttgtttttgtcaggtttgttgaagatcagatggttgtaggtgtgtggtgttctattccattggttctgtatgtctgttttggtaccagtaccacctgtttcggttactgtagtattgtagtatagtttgaagtcagctagtgtgatgcctccagctttgttctttttgctcaggattgtcttggctatacaaggtcttctttgatcccatatgaaatttaaagtagttttttctaattctgtgaagaatgtcaatggtagtttcatgggtatagtattgaatctataaattattttgggcagtacggacattttcatgatattgattcttcctatccatgatgatggaatctttttccatttgtttgggtcttctcttatttccttgagcagtggtttgtagttcttgacaagatccttcacatccctcgttagctgtattcctaggtattttatgctctttgtagcagttgtgaatgggagttcattcatgatttggctctctgcttgtctattgttggtgtaaaggaatgcttgtgatatttgcacattggttttgtatcctgagacttggctaaagttgcttatcagcttaaggaatattggggttgagatgatgtggttttctaaatatagaatcatgttgctgcagacagagacaagttgacttctctcttcctatttgaataccctttatttctttctcttgcctgattgccctggtcagaacttccaatactaggttgaataggagtggtgagagaggccatccttgtcttgtattggttttcacagagaatgcttccagttttttcccattcaatataatattggctatggctttgtcataaatagctcttattattttgagatatgctctatcaatgcctagtttattgagagtttttagcatgaagtgatgttgaattttatcaaaggccttttctgcatctattgagataatcacatggtttttatcttggttctgtttatgtgatggattacatatattgatttgcatatgttgaaccagccttgcataccagggatgaagctgtcttgatcgtagtggataagttttttgatgtgctgctggatttagtttgcagtattttatcgaggatttttgcatcgatgttcatcagggatattggcctgaagttttttttgttgttgttgtgtctctgccaggttttggtaacaggatgatgctggcttcatgaaatgagttagggaggagtccccccttttcatttgtttggaatagtttcagaaggaatggtaccagctcctctttgtacctctggtagaattcagctatgaatccatctcatgctgtgctttttttggttggtaggctattaattactgcctcaatttcagaacttgttattggtctattcatggatttgacttcttcctggtttagtcttgggaggttgtatgtgtccaggaatttattcatttcttctagattttctagtttattcgcatagaggtgtttatagtattctctgatggtagtttgtatttctatggggtcagtggtgatatcccctttatcattttttagtgtgtccatttgattcttctctcttttcttctttattagtctagccagcagtctatctattttgttaattttttcgggaaaaaaagaagaagctcctggattcattgattttttttggagggtttttcatgtctctatctccttcaggtctgccctgatcttagttatgtcttgtcttctgctagcttttggattagtttggccttgcttctataactcttttaattgtgatgttagggtatcagtttgagatctttctagctttctgatgtgggtacttagtgctataaagttccctcttaacactgctctagctgtgtcccagagattctgatacacgttgtctctttgttctcattggtttcaaagaacttcttgatttctgccttaatttcattatttacccaggagtcattcaggagcaggttgttcaatttccatgtaattgtgtggttttgagtgagtttctttttctttttttttttttttttgagatggagtcttgctctgtcgcccaggctgaagtgcagtggtgtgatctcggctctctgcaagctccgcctcccgggttcacgccattctcctccctcagcctcctgagtagctgggactacaggtgcccaccaccacacctggctaatttttttgtatttttagtagagacggggtttcaccatgttagccaggatggtctcgatctcctgacctcgtaatccacccatcttggcctctcaaagtgtctttttttttttttgagacacagtctcactctgccacccaggctggagtacagtggggcacaatctcagttcactcttgtgctccacctcccgggttcacaccattctcctgcctcagcctcctgagtagctgtgactacaggcacctgccaccatgcctggctaatttttgtatttttagtagagacggggtttcaccatgttagccaggatggtctcgatctcctgacctcatgaccagcccacctcggcctcccaaagtgctgggattacaggcatgagccaccacacctggccttgagtgagtttcttaatcctgagttctaatttgattgcactgtggtctgacagactgttatgatttcagtacttttgcatttgctgaggagtgttttacttccaattatgtagttgattttagagtaaatgccatgtgatactgagaagaatgtatattctgttgatttgggttggagagttctgtagatatctgttaggtcccgttgatccagagctgagttcaagtcctgaatatacttgtaaattttctgtctcattgatctgtctaatattgacagtgggatgttaaagtctccaacaagtattgtatgggaatctctgcgtctctttgtaggtctctaagaacatgttttatgaacctggatgctcctgtattgggtgcatatatatttaggatatttagctcttcttgttgaattgatccctttaccattatgtaatgccctttttttgtctttgttggtttaaagtctgttttgtcagagactaggaatgcaacccctgcttttcttttttcttttggcttccatttgcttggtaaattttcctccatcactttattttgagcctatatgtgtctttgcatgtgagatgggtctcctgaatacggcataccgatgggtcttgactctatccaatttgccagtctgtgtcttttaattgtaacatttatcccatttatatttaaggttagtatggttacatgggaatttgatcctgtcatcattatgctatctggttattttgcacactagttgatgcagtttcttcatagtgtcattcgtctttatattttggtgtgtttttgcaatggctggttttcctttccatatttagtgcttccttcaggagctcttgcaagtcaagcctggactaaatccctcagcatttgcttgtctggaaaggcttttatttctccttcgcttatgaagcttagtttggctggatatgaaattctgggttgaaaagtgttttctttaagaatgttgaatattggcccccaatctcttctggcttatagggtttctactgagaggtctgctgttggtctgatgcgcttccctttgtaggtgacctggcctttctctctggctgctcttaacattttttcctacattttgaccttgaagaatctgaaaattatgtgtcttggggttgatcttcttgtggggtatcttagcggtgttctctgtatttcctgaatttgcatgttggcctatcttgctaggttggggaagttctcctggatgatatcctgaagtgtgttttccagcttcttttcattctccttgtccctgtcacgtactccattcaatcgtaggttcagtctttctacatagtcccatatctcttggaggctttgtttgttccttttcattattttttctctaatcttgtctgcatgccttatttcagcaaggtggtcttcaaactctgatatcctttcttctgcttgattgatttggctattgatacttgtgcatgcttcacaaagttcttgtgctgtatttttcagctccatcaggtcatttatgttcctctctaaactggttttctagttagcagctcctctaaccttttatcaaggttcttagcttctttgcattggattagaacatgctcctttagctcagtggagttttttattatccatcttctgaagcctacttctgtcagttcgtccatctcatcctctgtccagttctgcacccttgctggagaggcattgaggtcctttggaggagaagaggcactctgcattttgggttttcagtgtttttttgttgattctttctcgtctttatgagtttgtctagttttgatctttgaggctgctgacccttggatggagtatttgtggggattttttgttgttgatactgttgttgttgctttctgtttgtttgtttttctttcagtggtcaggtccctcttctatagggctgctgcagtttgctgggggttcacttcaggccctattcatctggtttgctctcgcaccaggagatgtcactcaaggaggctgtaggacagcaaagatgggtgcctgctccttcttctggcatctctgacctcaaggggcaccaacctgatgcgagtaggatcgctcctgtatagggtgtctgacaaccacgttggagggtcttacccagctgggtggcacagggaacaggacccatttaatgaagcactttgactgtcacttggtggaggggatgtgcttcgctggggagaaacccactcttctgggctgcctggattcctcagaactaccaggatgaaaggctaagtctactggtccacagaaactgcggccactcctctccctggggctcaggcccaggaagatcagggttctttccctgagcctctggctggagttggagttcctgcaaggagtccccaccaagtgagaaaggatgagtcagggtcaggcctgaagaggcactctggctgcagtctgccacagctggtgtgttgggctgtgggggaacctcttgggaccaagctgcccagccttcctggccccaggagaggaaaagcatggcctggagctgtagagatggatgctgtccttccccacccagggagcttagcgtgacaggcagttacaagtcccagtgctggctgctgcccctcctccaaggagttcaaatggcttagacagcaggcagccacagctgtggtgctggtggcccctccccctgggaacttggcaggcttaagcagattcgagctgagaggctgttgagaatctgcacagctctggggttgggaccctaggccccagtggcgtgggttcacgagtgggatcttccgatccatgggttgcacagttctgtggaaaaagcatggtttccccggctgggtagcacgctcactcgctgcctcccttggctggggggtgagggctcccctctcccatgtggctctcaggtggaccaccacaccacactgctcttccttcctctccatggatcatgccagctgcctcgtcagttccgatgagagaacctggatatcttgattgctggtggaggattcacacactattatgattctttttgatggagcctctctgatggctgctgctcctagttggccatcttggccctgcctccccgttcaagttttattataagattgcagcaaagcagtcacacctttaggttctaataataattattgtcctctagcaatttctaccacaactacagtgactttctccactgaagtcaaagtcgtccatgaggattggaatcagcttcttccaaactcctcttaatgttgatattttgaccttctcccatgaatcttgaatgttcttaatggcatctagaatggtgaattaaggttttaaatttacttagcccacatccatctgaaaaatccctatctatagcagtgtagccctacctaaagtatttcttgaataataagatttgaaagtcaaatttattgatccatgggctacagaatggatgcgttagctggtataaaacaacattaatctccttgtatatcaccatcagagctcttttgtggccaggtgcattgtcaatgagcattaatattttgaaaggaatcctttctcagcattaggtctcaacagtaagcttaaggtatttagtacaccatgctgtaaacagatatgctgttatcagattttgttgtgctgtttatagagctcacgtgaaataggtttagcataattcttcagggccctaggatttccagaacagtcaatgagcattggcttccacttaaagttaccaactgccttaatgcctaacaagagagtcagcctgtcctttgaagctttgaagtcaggcattgacttctctcaagatatgaaggtactagatggcatcatcttccaacagaaggctgttttgtctacatggaaaatctgttgtttggtgtagccaccttcatcaatgatctcagctagatcttctgggtaatttgctgtagcttctccatcagcacttcctgcttcaccttgcacttgtatgttatggagaaggcttctttctttaaacctcatgaaccaaccactgctagcttcatacttttcttttgcagctttctagcctctctcagttgtcacaggactgaagagagttagggccttgctgtgggttagattttggcttaagggaacattggggctggtttgatcttctatccagatggctcaaactttctccctatcagcaatacgtttgctttgctttcttatcatttgtgtgttcactggagtagcaattttaatttccttcaaggacttttcctttgcattcacaactgggcggctgactgcttggcacaagtggtctagcttttggcctatcttggcttttgacacgccttcctcactcagcttaatcttttctagcttttgacttaaagtgaaaggtgcatgattcttcctttcacttgtacacttagaggccattgtaaggttattaactggcctaatttcaatattgttgtgtctcagagaaaagggtggccccaggagagggagaaagataagggaacagctggccaatggagcagtcagtacccacacaacatttattcattaaattcaacatcttatataggtgcagttcctgatgctccaaaacaattacaatggtaatatcaaagatcactgatcacagatcaccataacagatatattaattattcaaatgttgtgaaaattaccaaaatgtgacacagatacatgaagcatacacatgctttgtaaaaatggcaccaacagacttgctggactcaggaatgccacaaaccttcaatttgtaaaaacaaacaacaaaaaacccccacaatatctgcaaagcacaatgaagcaaagtgcaataaaatgaggtgtgcttgtagctattgtagtcaaatccttagagatagaaagttgcatggtggttgctgggcctgggggaggagaaaatggggagttattgtttagtgggtacagagttttagtttgagaagatgagaaagttctagagatggatggtggtgatggttgcacaacagtgtgaatctacttaatgccactgaactgtacacttaaaaatggtaaattatatattatgtatgttttaccactttttttaaaaaaaaaaaaaaaaaaaagaagaaactgagaaggagcaaccagtgaggagggagaagaaccagaacagtgtatttcctggatgcctaaaaaatatttcatggaggaaatcaaatggtgaattcaggtcaaatgatgaatttccttctagcttttctttttttatggagacttcactttggcacacttgtaactttactgacaatacccttttgtatatgcttttttttcccttatatcatgaccgtttcctgctaatattcaaattaggccgtttatttaagggttgtcaaatctcaaatagctcatcatagaatctggatgccaatatataaatctcataatgagctgttatttggatgttatacaacagtggtttcaatgaatcatccatgaggcctggagttgaaatgaatgctttatttattgtctcccattgctgattataagctgtttccctgactttgtacagatttcaccattatgtgaagccacagtcataaaatttggtatagatatttgaggtttaggaaagaagaagaaaactctttacacaacaaagtaaaggtttctccttttttctcctgattgctaaggagatcaacctttgacccttattcttggttccaactatttcttaatttacctaacatgcttcagtagtttttttggtttgttttttggtttgttttgtcattttgttactataaatgtgtttttatttacatctttactaaatggagcaaaatagggctaacaacttattgaatgatctgtgtgtgtgcgtgcatgtgtgtgtgtgatggttttgacagctattcacatttatctttagatgtaaattatatggcatagttccttttttatgttcattaaattccatagatgtcagtggtttccttggaaacaaaaacctttatataactagtcagagatttggtagcagaaatatcaggatgctggcaggggttcaggggtggttaaggaatggttcccttggcagatgtttgcatttaaaactcttctgacttttctccctgccccttaccatcatggccattcaatagtgcacaagataagatttttaaagctactattaaaatgtagaatattttctttaatggctaaaagctttttactttaaaaaaaaatcgcagatatgttaagtcttttctggggtggtataatttcccaaatttgagaagaggttggtgtatctcctatcaacagttaaatctgcatgtttaggcaatgcctacatttttcagtatatatggtgtccatttgtaaaatacagtgaactgcatatgtgtgtggttgaatcaagattctatgtcatttataatggccagcatctgtcctattaccttattgccaaagggttctaaaggacctggagaggttgtagagaaggtaagggaaaggtcacggttctgctcaagggtaatagtaggtgaaaggcctggcagccaagaacattctcacggaggcccagagtggacctgttgttgaagacagaattagtaccatgagttaatgaaacccaggtcttttcagaagattgtgactcatttttatcattgcccctgtctggtgtaatttcaacgtaaatccaatttgttctacatgcaatggtacatagttgcatttgggaaacatttctcaattttaattcttttaaacgcaataatgcgccatcttgtggacatatccgatattaaattcttaaattaattctacatagtgaactgctctctaagccagggttttcaatcatgggttctaatatagagatatgagaagcacttggggagcttttaaaatcctgatgtgcaggccacaccccaatcaattaaattgaaatgtctgctgtggggctccaacactgatattttctttaaagttcccaagagattccagtgttcaaccaagtttcaaaaccattcgtctaagtaaaaagagtaccagcttaaatggatgatttctcttttgaaaatagagattttacacagaaaagcattgagaattttcctacaaaatatgcttgtcaaaaggaccacttttcagtcaagttttccttaaacttgaccactatacttaatgtagagaagtacaccacggtacttgtatcagtcttctctggttaccacagcaaagtaccacaggctaagtggcttaaagcttaaacaacagaagtttattctctcacaattctgggagcgggaagtctgagacaaaagtgccagcagggttattttctttggaggcctttctcctcggcttacagatggctgccttccccgcatcttcacgtggtcctccctctgtttctattcctaatttcctcttctaataaggaacaagttgtattgcattagggcccaccctcatgaatgcatttaacttaattacctctttaaagcactattgctaaatactattaccttctaaattactgggggttaatacttcaacatataaatgttgaggggacacaagtcagcccttaacagtgttccctcattacattacaaagcctagcttaggatttgcttctttataaggagtagcagtgtatgattattttgctgttggtttaatatagaaaagtagatttttttctttataatcaatacaatggtcaatgtggataaaactgcatagtcagaatcatttcagaaatacacaattgcttttgcagagtggctttagtacagaatatgttgatttggcattatcagcactaatttctgcatgccccagggcacccagtatgtgtctttgtgtattgcaagtgcctataagagtatagttattaaggtcacaagctcttgggtcagaaagccaagccacaacaccaataacaagctgtataatcctgcaagttatatcatgtctctgagacttagtttcttcatctgaattacaggaataatcgccatgtttatatcatctagttgcggtaaggactaaatgacaaaatgcacgtaaggcacctaacacaattgtcacatccattgtttgtctaaatgcattttgccatcattattaagtaaataaaatatataacttacatgtatgtgatgtagtgggaaaaagcaagttaaataggcataatttacctatttaccatagaattccatgcactaatatagattgtcactataatctatatttatatatatagattgtcactataatctatgtataagagatttatacttttgtagctgtggcatttaaacctactgattaaaatctaacttctatgtattagctatagaaaaatgaacttgaggcatatttctctttgcagccaaacacctacccccagagaactatcacagcaatattgttgtactaagacttacagttcttatttagaaaactgtctagatttgccaacagttaaatagattttccaaccatcaaaataattttagagcaatttactttcagttaagaacatgcgggtatctttttctgcactatgaagtcattgaagcaaaatccaaagcactgttttgaaatggaataacaaggttaggggtcagagagacccagattcaaactccagtgcacttattagctgagagaacccaggaaggtttattggtttccctgtgaatgataatacttgctgtattgatttgtcttgctagttggattttaactggtaacaagacataaatcataatgtttgatactacttacttccctatgggccttaagttcacttttcagtgtattcttcttaatgttctgtgagactggtaaataatgaagtatatatatatatatgtgtgtgtatatatatatatatatatatatatatatatatatatatacacacacatatatatatattacttgaacttcctcaattttggagattaggtcataaactaatgtggcatgtaatttgatacatgttccagcaggggaaaatactgggatgtaatttaacgaaagaaacattttgaaatgggaatattctctgaaaatatggagtatatcattacaattccttttcagctttaggactcataataaactgggcactgtccagtttatgagcagcgagttcctatagtttgaaagtttgcgtcccctccaatattcatgttgaaacttaatcgccgatgcaatagtatttaaagttgtggccttttgaaggtgattaggcaatgagaactcctccctcatgaatgtgattaaggtccttataaaagagatttcactcaaggttcagtcttttttgcccttcctccttggcccatctgaggacacagcattcgaaatgccaccttgaaacagagagcatccctcaccagacacggaacctgtctacgccttgattttgagcctcccagccttcacatctgtggaaaataaatttctgtaaatatttcccacctgacagatctttgcttataaattggccggtctgtttgttatagtagcacacatagactaagatactagtttttaatttgggtactgcagctgatggaataacctgggtagagtcataccatcttttaggaatctcaccttcctcataaaaaatgaaagagacaagcaggatgatccctggggactaaaggtaatatttgtatccatcatggagctattgggagaactaaatgatatacatctctcaaatggatttgccagccataatgtgtgatatagtaatatcaatttgtgagtaagttgggtagagtggaaggaacttaggaatgtataccagtttattctgagaaatttgtgttttgtcttctttgaatgggaaatggctgaaaattcttaaattccttcaatgtaccataaaaaagtgaaatcctatatcactgcctttggatgtgatacatgacccatagtaggtattttcgtagatgaaagaattcctatctatggcatttatcttatgtgaaaagtggcaattaagatagtaacatatttgccacttaacagatatttgttaatgatgaaataaagttttccggaactcctgaaattaatgtccatagagatttcaagaagatggaataacctaactaattagacagtatgtttgttggtgtttaaaggtgagacaagaccactgagattaaaagatcagaaaattctcctcacacacctaatacattttctctatgccacctggtacttctgtactcaaatgctgcttgatttttatatttatacccaagaattactgatttcaggtaagaacagagggcttgagagaagaatttgctcatcactgcctgccatgaatgggcatagctctgtgaacagttattgtatttttttttcctcaggtatatagaatactttatcaaaaccaaaactcactgtttctccaagtgagttccttggaatactaatagatgctataaaaatgtcatctaggtgtggtggctcacatctgtaataccagcactttggaaggccgaagcaggaggattgcttgaggccaggagtttgagacccaaagccctatctcttaaaaaaaatataggtggatgcagtggtgcatgcctgcctatactcccagctactcagtataggctgaggcgggaggatttcttgagtccagagttcaaggctgcagtgaactgtgattgcaccactgcactccggcctgggtgactggtcaaataagtttgggaaatgctaagggttcctttattgcaggatttctcacagcttttgatgtgttggacatgggttagtgtcacttctttcttttttctttaactatgggtctcttggtcacaagcatctcataggattaatataaatgttctaaaagccatttattatgaagttaaccacacttaataaactagaacaccagtttatgagtgatgcttgtcttcacagtagtgcagatcctattaaagatgtttagagaacaggttcttaggtgatctaaaccagaaaggcctttttcatatatcttgataatattaatataatgttgaattttgtcttgtattatattatgatgttttgaattttaaagtttactatttgcattcttcccacctaattaatttttttaatttgagaccttatgacagaaaaccatcagcattgcccacatattactcaaaacacaagaatttcatttattcccatagcacctggaatctatgctggcatttagacaagcctaatgcctagtgtaccactagagtgagattctctgtccactcttaactatttctagagcctatttttctatggtttcacatcttatgacttatataaaattggtactacttggcctttgtggaaggattttaagtcaaggtaaaccttgaattgaggttagattaaaagtggtagaacttacttagggagcaataacttttaatagtcatagtttcttttcggttcctggtgtgtgtgtgcagaaagaaagaagtctgatgattctctggttcatgggagttgacttttatgccctgaaagtgaggctttgcttctgtatcctcacactggggaacagcagtggttaagaggctccaccagtattactcatgtggtcacaatcaagttgcttaacttcatgtcttgctttcttcatccataaaatgaagttaatagtactatttctcagggttattgtgaggactaaaggccataacatatatttcataataggggatctgtaagttgtagttactgttatccttaaaactataggccattagtgcatatgtttaataggcttgaagctgtgccattatttgacaagttaaactcttggttgcatcatccatattctcaatgtttttctttaggtatttgcatttgccatctatagtatataggcttctatctggcaaagttttcacttttaatggtatctttaacaatatttttcaaaagctttgagcatcactcatatttcaaaaatagtaaggtcatgttaaacttttaaattaaatcgtttcttcctagactatttcaagatttgtaatacctggttaaaattgtttagcaaacacaatttttctttctatgaatgttaattaaaaattaaatttgactctctttagttgaaattagtcattttgtatctgtgcatgaattacattttccttgattcttatagtaccttagtataaataaatttagtaagagtttaaaaagaagtttccttggttgaggtacatacaaacaatatgggaaattgaacacctattgactttattatttttgccatagataaatctctactgtcgaaagcagtagttaatgagacatttattttattttatgggtctctgaaacatgcttctctattaatcaatttgcttgcaattttgtttgaagattaaagattctttagaaggcattgtctacatattattacttatggataccagatgaaaatctaaataaaattaatttaagatctcttatattagttctgtcctacacatataccaaagaatgtggaatggctgaataaggaaaattaaattttaagtttacacaattttaaagtcaataatgctttcaaataaattatctatacataatattgaaaaggaatagctcttagaatatctaaaataaaaatagatgattgagtgggatatttcacatgagttggtggtttataaaactttgagaaagtatgttaaagaataaattgtgtaagtaatagcgaactagactcagtatttaattttatgcttagctgctcaaaatttcatggtttgagttgagaattcttaagtcaaataatttatttgaaggatactgtagagcatttgaaatactgtgaaggtgtgactagaaatctgtttttcccattttaaaaaaaaaacaaattgttattctagactataaaatatagaaagtcataatagatggatactcttctctgtaaatatattttcccctgatacttaactgtaccatgttattctaaattattcctggtaaatgcttacaactcttccaagtgtctggaaactcatcaagcttcttttaatcatgtccctcaaatattcggcttgtaatttactaatattcatgccctgtttagattgtaaacagagaaactacaaagttgtaacagaaaagtaatatattgagctgaatcatgccttacttttgtaagttgagcttgtttctctggcaacaagatgttagataataaatcatatatctaaaaccatataactacagaagtggggagctgaaagttcagaagtatcatctgactgtgttgatggcatctttacctcaattaataaggtgtggcaacgttcactcaaggacagaaattcaatctgtggtggatccaaggggattcaaaatatttcttttaatccaaccaaaacatattgctttaatggcattagttggtattagttgcatgtggcaaaaatttcatgcactattaatcctagcactacactgcaacactagaattatgtgtccttggccttaaataaattattcggttgtatgattgagaagagaaaaaccaattattttagaggccagtcctgaattattgccttaataaaggttcaatttcaaaaaaatgggaagttgctcagtccagttgaaaaacaaggtgggaagagtaacagcaagtgagtctttaattttgtcaacatctgatgctactgttaacacaaaaagttgctttgaaaaaaattcaactaaataagttgccttcgtggtttagtaattccagatatacacaatcgtctgtttattttcccaaagatcaaactgtgttcatctatatatttgcatacgtaacatattaaagttttctcatctaacatgacactgtaagcatggccatgattctaaatatttttaatatttatcagttgtatagctgaataataatgcattgattggaaatcatattaactacttactatttacttttgagtagacaatttctgttttatttttgctattataggtaaatctgaagcagatatctcttcttcatttggcgtttttattctttggtaatgcctcaaattgtaatcctagcagtgagattacagatccaaatagatctaattcaatccattatcacaggtttcttcctcatttcctcttctttcatgtatatctgtttttgtatagtggcaattttgattccttactgcattaatgtattcacttctttgtcatagtctacacaaaataattctagaataaaaatactgttgctactaatacaagtccactagagaaaatccaacgtttctttgcaattatctttattccttattgtatgcttcactaagaatatatactccaagattattaaaattattttctatagagttatattattaatttgctatacacttagatttatatatttatagttacgttcagttttagagattaaaatgctctattgcttttatcaattttacatttggaaagtataaaatattcctttgcctcagcattcaaaattatataaagaagaatgctcagggaagtcactctcatccatatccttccaccctattcctacccaccttctggttttccttaccatgtttctgtttacaaaaataaggaaacacacacacaaacccatacctagctacccagtcctctcatctcatttaataaaaagtccatctttccccagtgaattgagacaccagttttttcaaaatatatgtaaattgcctcagtctttcttacacaaaatgtaacattctatctatgtgcttttataggttgcctgttttacttaatataacgtcaatacctcttcatatgggtcatgggaatctttttcattcttttgtacagctgcatattgctccactatatggaggttctgtagttttttcagtcttctgtgaatgagcatttaggttgtttccattattttttattatgcataaggctacaattttttttttaaatgccttcctttacatatgcaaaagttcagtttcaggataaattcctagatttgtttgttttgctaacatcttcatagactttttctttgtttagattttaccattttctaccccccttgcagtgtattacagaatctttattcacacagtctcaccacaaagtgtattgttaagcttgttatttttgccactttgacaggaaatgtgatcaatacattttaacttacctttttcttacctatgcatgaaactaagcctcctttcacatgtttaaggaccatgcatgtatatacatacatatatttctaaaacatatataaatatgtatttatacacacatatatgtcttaataaatatatgtcatatgttttaatatgtcataatatatgtcttaatatacataaatatgtcttagtcactttggacttctataacaaattataaatatgtcttagtcactttgggcttctgtaacaaattaccatagactggtggctgaaataaaaacattacccacagttctggaggctgggtagtccaagggcaaggtgccagcaaatctcatgtctgctgagggcccacttcttggtttgcagttggctgcattctcattgagtcctcacataggggaaagcagagagagggagagttgactctctagtctctttttccaaagacactaatcccattttgagggctccaccctcatggcctaatcacttcccaaagtccctacctccaacgccctatcacgttggggtttaagcgtccatatatgaattttgaagggagacaaacattcacttaatagcacaatgctcatttgcataatttgcactttttttttttcatctggtatttcgtcctttttttctccccttggtttttttgagctctttatatatcaggagaattagctctctatcgtaccctagaggtgcaaaaatgttctcccggtttattttttcccttttgattttgcttttggtgtttttttgttgctgttgttgatgttgtttctgccttgtaagtttttgtttttatttttatctagtcaatttatcaatattttatcttattgcttttggcatttgagtcacagttagtaagtctttattcatgcctagtttataaagaaaattcacctatagcttctttttttttttctagtatgacttcgtgattttccatttagatcttggagcatcttggaggttttttttgtttgtttgtcatgaggtatgaacccaattttatttttctaacttaccgttcttttgtcccaacactatttttttcagaccatcttttgccctatcctggtatctaggtgttccaataacatttatttaaaagtccaattgtatatctctttttatttgcaatccagttgtgccaacaccacttatttaaaagtctatcttttgtactacttatcaaaaagtccaacttttgtctaggtgagttaaaatacttacctttttcatatataatgtttccttccatgtgtacctggatctatttctggaatattttttactatttcattgttcagtgtgtctattaatgcttactgaaatactttaaattcaagttctataagggaaaagtggattcttattctagaataacaaaacaattagaaattggcattttttaccaacccattatatcaaatattactctcaatactattctctgctttccaacaaccacctcccaagaaaaaactatttttccctaagacaatttttgtttgtttcatatattttatgtaggtagagaatgccattttctagttttcaaaactttattttttttactttattttttcaaattcctagaaaatgacaaaatcattactagttaaacaattagcaatatcttgtagatttacccacaaagtcccgaaaataaaaataagaaaaaaaaccttttggttattctgccttataaactttcatttttagaaatccatgccatcatataagttgtttgttctataatttctgagctcattttatgtaaaaataactcctgtgcattattcatgttgacaggccctttaaatagccataaagcctgtgggaacagattaatgctgcatctgccctgtgctttttaagtctatcatttttatggaatggaaatcttgcataatgtcagaagttttctgacattgtcaactgcttgtggtggcatagggaagtaccttagctgcactatgtgggtgacaatgtcatatttcctgattggatttttatctgaggagggtgagaactgtcagtttcacttcctcttagaaagatattttaagttgaataagttttcctttaagtgacttgtcacaggtggcaactgtctgagcctgtgtattctattctttgtgccagaattttcttaccactgattaccaggcacataatcactcttgccatttatgacctttgggaaatgaaaattaaaatgttattagtccatgtgggtagcagtggaattggtctgatgtaatgtttttaaattgtttttattttttgaaataaatgatttttacatctactaaaaagtaaattacaactattaaaggttatcttattaaaaagtatttccccttctccatttcttctgttcccttcccctgaggcaaggattcatagtactgcagtttcttgttttcgtttcccagaaaacctgtaaatgatgacatgctatcaaatgctatttaaacttagcaatttgttgcagaaattatgccgtgtcagcacaaatacaagtcctcattctttttctagaggttgtagagtattatttcattttatagatgtgccataatttatgtacttagtcatttgttaataggcattttattgtttccggttttttgctgcctcaaacaatgctttgatgtgtatatatatgtatatataaaatatcatctttgggcacaatacaggtatattcgaatttcctgttggtgaaattgctaagtccaaatatatgtgcatttttaattatgaaatgcattgccaaatggctcagcgaagagattatataaattaatcaattacacttccaccaacaacaatcaagattacctgtttcttcatactcttgccaacaccatgtttgattgaatttttttgatctttgaaatgttatagatgaaaaattgggagctctttattacttaaatttgaatttcttctactgtgagtggagaggaaacttttcatattgtgttgtttgtatttctaaccatatcctttgcccattttccaatatatagttcttctcactgtttcgtaagatattttgatatattaagagctatcatatactggaaatatgatctccagcttttaattttaatttgaccttgtagaattattgccttccagaattatgttttgtagtcaaatttattagtccctttttaaaaactgtacttccaaacagagcaccgcttggaataactattctaaaataataaagattattttgtgatttcttccagtgtttttatgattttaatttttatggttgtatctttgagctatctggaccttattttatgacagtgacaaaggaatctttattagtcaggattaaagtagtccatgataacaaacaactcccaaatgtcagtggaataacacatcaaaaatacatctcttgctcaaaccatctgctgaaggtctgcaaaaacattccaagatagctatcctcagtgatctagggatgtttctgtcttgagctcaaccatctcagcaagaggccttgcatttgctgtggcaggagaaaacagctagagaatcaaagaggattcctcaatgcctcagcctagaagtgacatgcatcccttctgcttattgaccatgtccaagtcacatggcccagcccaattcaaggaggctgggacatacagattccagtatgcccaggggtgaaaggagaaccagtgattagtgagctcataatgtttaccataatatctattttatgttactctagatggctgccaggtcatctaacattacttattgcataacctatttttttctcattgatttggaatgctatcttggttatacactgaaagcttctgtatctttccattttcccctgagatcattgacttttctatatatttttagactagtaataaaatgttttaattattgtggctttacaatatatattacttggtatagtcctgctttatcaagttttatttacatttatattaattttcatttgaatttcagaatcaatttatattgttctcctaaaaaccatgtgtattttttattggtatttctttaagtgatgagattaatgttataacactttatgtctttagcatactacttttatgcaagcagaaaatatgtcttcatttatattcaggttgtcttttgtattccttagtaatgttttaaggtctttatcatatagatcttacagttaaagttaagcttccgctgagtgttacatcactttgatgttttaagtggagcttttatttacatttctaaccaccttttattaaataaaaggaaactaatttttgacataatattatgtatccatgtacttcaccgaatcttttaaaaaatagtttccaggccgggcgtggtggctcatgtctgtaatcccagcactttgggaggccgaggcaggcggatcacaaggtcgggagatggagaccagcctggctaacatggtgaaatcccgtccctactaaaaatacaaaaaaaaaaaaaaaaattagccaggcgtggtggtgggcgcctgtagtcctagctactcgggaggctgaggcaggagaatggagtgaacctgggaggcggagcttgcagtcagccgagatcgtgccactgcactccagcctgggcaacagagcaagactccatctcaaaaaaataaaaaaaaaatttaaaaaaagttttcatttgatttttttcattttaactcatactctctgtaacaattacagtgtcacctccttatttctaaattttatatctatttttgtctttgaatttaagtttatgtattttgatgacttggtaaaattctcatccctttgcagttgggcaaaaattaatcagtgttgtatatgatatcattttattagattctaaactctttgtgagttagaactatttaattaaataaaaatagttgacatctcttataggaaaatcactgtgtgaagtcccaaatgatataaaaaaagaaataaaacatagttcttatgctcatgattcttacctttgaaaccctccctcctcagccccacaaagccaggcacagtggctcatgactgtaatcctaaggctttgaggggctgaggatgggaggattacttgagcccaggagttcaaggcttccatgagctatgatcgcaccacagcactcctgtctgggtcaatgaagcaagactgtgtctcaaaaaccaaccaaacaaaaaacaacagggagtgtccaaaggctgtaatacaaggtcaaatgtagtaaatgatgtaattgggaatcgtaagaagtgtttggaaatattagattttaatttgcccagtggtgccgtaggttggaatggagggaatgcaggaagatgggcaaggcttcacagagaaggaagcatttaagtgatatgttgatgttcagaaacaagatagcatgtgagcagggtgtagtgacacgtacctgtagtcccagctacttggaagcctgaagcaggaggatcacttgagcccaggaagttgaggcttcagtgagctctgatagtgccactgcaagacagattgtggattgcagaaatggccattgcattcctcaggggaaaatctatactcatttttaaagcttaatttttttcagcatctagaataggtgcacccatgaacattcagtatcttcaggagactaaccatatgggaatggtttactagtaactcatttgtacttgagtatccattatattggaaactaggaccatttctttctcattaattgagagtcatgatttgtctataatgtcctttatgatgcagaatttatctgatactttgagttaaatcaggcttgctttttggctcataagtatttatgtatagacagaaattgtggcttttatctatttttattaagtaaaattgtgactgattttatagcaattaagatgaatttttctttgcagacaaattttattgaaggaatattgacaatcaactttcattgaaagcaatgggttttgtgatttcatggaataaatgctctgttctaagagttaactgacctatgtttttgtttcagggttttggctaaatagctgcacatctgtagcacaaagccatttttcctcagtttcctattgtgtagaaaaaacatttgggatcacaaaattcctaggttccttccattctgaaaatttttacactaattccaactttgccttgaatgtctaatgatttgcatttctctatgtaaagcacatctcctggcaccgaactgaaaatgagattagaaaacacctagtagagaggataaaaggtacaagtcctaagcttattttgcattccccttcttccttttttctcccctgagaagcaggatgtcaagctccttggaaaactaatatttcaaaggaaatatcaatttgcaactgaagtatgggattgaatgatttcattgtctcaaaatgatatggtggtgagggtaacattctataatttaaatattcaaagttttgaaaatgtacagattcttttagtaattcttccccagaaatactagtatttactagtagtattttttaaaagcaagtcttctttgcaagatataatcagtattgaatccataaaacagaatattttggaagtatggctttaacaccatggcataattatagctgattatgaccagagttttgaattcaagtaacattaacacaccacaattattgaagttgtatgtatccagattagcaaaatgagcaatatttttctctcaacccttaattcctacatgttagtcctatttcctctgatattttcaggagtcctctttgctttcagtaggtattcaaatgatgactctttcagttctccatatagaagacagaaattagtcttattctcaagctctaacaaaccttcccaaaacccagtgacataaaacaataaacatttgttattgctaatgagtttgcaggtcagctgagtggttctgggttcatgtatgtgtctgtggtcagctgtgggttgatgaagtggctctgctgatttgggctggggtctctcacatgtttcgaggtcatctggctctagactagtctagagttgtccctactcatctccgcgtgttttgttcagctctcccttaaaatcagcactcttctggtttctccaccctggggatatcctcacagtgaaagcagaacagtaagagacagagtggaaacacacaaggcctcttgaggcctagacttggaacaggcactccatcaattacgccacatgctttcgcccaaagcaagtctcaaggtcaagccagttttcccccgatttagcagtagggaaatagaaggagctacagtcatgttgcaaaaggatgtggatacagggaaggtgaagaattgtggccacttttgcaatcaatctaccccactttccttctgagaagctggttgtttccagtgaaatcaaagccagctgaaacctggacaatcaagtagccaaaaaccttccctgttagacttcagcatattgaatttggcttgtaccaatttacagagccagttgttaaacacagctattaaactacataaacttcaatctaaatacattatattgaaaaaagatgatcatgttaatactgtcacttcctactttttattattatccatgttctcaaagttatttataatcattatatccaaatggtaggaatgctatataatgatgctactgacatctctgcccaaatctgtgctcagtgacaccatgttgatagattgaaattggccatgagagtatttacacaagataaattgacaaacactactaattagggctttttttcttcctttttttttttgatagctgcttgttaacatttaccagcccatcattgcctgtatgtgtgatggaggatttgaaggcccaagtcaagtcattcctgcattttatagcatgagttacagatttactttattgacttttatgtgttctatggctttgatggaagaaggaaaatatgtggatagagtaattgaagaaacgaaattgcttaaagctacattttaaaatcagtaatgaccatagtgataaaagctgtttctctctttctttagtaaactttactggatgtaatgaaaacaaatttattcaacttactagtgtcagtgtacaagaataaccttaaggaaaaatggaagaacatgcaggtaatgttttaaattacagcttcagtcattaaaatatggcatatgcattcaggcaaaaattgtcttgtgttaagtgttttcaacacataataatttcaagatgaaattattgtgaattgaaaagcaacaaaaggaaagtgaggttcactatcttctatctccttgctaatggaggccagaacttatttagttttgtgagtcagatgagttgaaatttgccttccagtattccaaggcagcaaaaggtcattccatctacataagagcctgtcgagcagagagcccttttcataaagaaaattcattgaagaagcactagaaaatgaatataatgcaaagagtaaggctgttcaaattctattattcagttttaccagtattacagtaaattcccagaaaaaacaagaattatagtgattttatgtgagggatcaacttacctgggctctttctggctttttaaaatccgtttattgggggtattttaatgaattgttagaatgtggtattggacagtgggaacttataatgaatatttgagatgtggtgtttcagagtaggaaaaatgagactgctaagtaagtaaagaatcaggattctatttataagcccctgacaatccaaagaagattgttttaactttcagtgtaacttctgaggctacacagcccattgcctcctgatattttaactgttacacataaccaagggaggaaagctagaatgaatcatgtgatactaaaatgagacatgcatagcttaatttaacaaatggataaatttgaaaataaaattttttttaatgtgagcaaataagaaatctttcatacagaatagtcccaagtaacttatgtggttaatgcacccttgataggctggaaaaaaactccccagcctttaaatcacagataacgagtatcttccaaagagtacaatatggaaaaagggaaaaagagtaactttctcagtggagaaacctgacaaacactctgtattagtccattttcacattgctgataaagacacacccaaaacttggaacaaaaagaggtttaattggacttacagttctacatggctggggaggcctcagaattatgcaggaggcaaaaggaacttcttacatggtggcggcaagagaaaaatgaggaagaagcaaaagcggaaacccctgataaactcgtcagatctcttaagacttattcgctatcacgagaatagcatgggaaagacaggcccccatgattcagtgatcttcccttgggtcccttccacaatatgtgggaattctgagagatacaaatcaggttgagatttgggtggggacacagccaaaccaaatcacactccctcagccggtgatcaggtcaacattttcagtattaagtcatgttgctggtttgtaaccttggtgtgatgtaataatgacattatctgctggtcttcttccccagaaccgaaaattccagtctaatcatgagaaaatcatcagacaaatccagattaagggatattttgcaaaatacctgagcaggattccttaaaacagtcaaggttttcaaaaacaaggaaagtctgagaaaactcgtggtataggggaacgtaagaaggcatgatgagtaaatgcaatgtggtatcctaaatgggatcctggaacaaggaaaggacactaggtcaaaactaaggaaatatgaatagaatatggacattagttttttaaaaatatcaatattggttgattgactgtgacaaatatatcatactaatgtaagatattaacaacagcagaaacagtttcccctgttgtagaaggtatagataggagtattctgtctattctctttgcaacttttctgtaaatctatttatagacatctaaaatagttgctgtagtagggcatggtggtgtgaacctatagtcccagctaatcatgaagctgaggtgggaagattaccgggggccaggagttcaaggctgcagtacatgaggatcacacctgtgaatagccactgcaccactccagcagcctgggcaagaccccttcttaaaaaaaggaaaaaagaaagaaaaggaaagaaagaaagaaaaaggaaaaatgaaataggtactgtaaaactgttctgaattggaagttttttttaaaaaaaaaaatcagattatggcgacataaatattagacatcccttagcaaattctctgatattttaaatcagatgcatgggacatactgtaaatttgtagatagctgaatgcaacacatatttaatacaatgattcttaactctggatagctttacacctttaagcatattagcatttttgtctgagtagctgaaatcacactgtaaaaaaagtcaactgtgttagggtctatttctagctgtgccactgcccagctgtggcatctgaaacaaattacttcatctcacattcggcagcctttctgcccacgccacaaatatagtgctgtgtgttcaggacacttaagaagtcatgtaacagtaataatttttttttattgctaatagctatgtaatcttatcaaggtctatttgaataaagggctctacaatccaaaatatagttgatttactatcaaataaatttaattttcagtattttacatggtattcaacattgtaatttaaacatttcgtttagaaacaagtagcatttctgtgggttagagactgatttggagagaccacatccacattcacttaccatgtgttcccaactaaattagctgaagatgcaaaaacccagtggacataaagtcagggctaagggagagaaagtgtgtattatctaggctttacctgggtaaggaaagggcttttctgtgatggcatgcaactgcctatgacattctttctacaagtagggtcttgatggaattaaagaccataactcgaacttgctatgctacaagccttttctatgggggactatattcccattccacataaacaacattagcaatcaggggtctgcagatattttcttgaatgaaatttgacatctctgaggaccgacaaggatactgctcatatggaatgtatattatttttattattattattattattgttattattaattttgagatggagtttcgctcttgtggctcaggctgaagtgcaatggcatggtcttggctcactgcaacctctgcctcccaggttcaagtaattctccttcctcagcctcccaactaactgggattacaggcgcccaccaccacgcctggctaatttttgtatttttagtagagatcgggtttcaccatgttggccaggctggtcccaaactcctgacctcaggtgatccacccacctcagcctcccaaagtgctgagattacaggcatgagccactgcacccagctggattgtatattctgttaagagtggggatcaataataggagacaataaacaagcaaataaataatattatttaagaaattgatatgaactatgaagaaaactaaagcagagtcacaggaaagaagatgctgggggatgaggtccccccattgaatctgatttaatacacttttatttgggtggtgcagataatgagttgagtctgaggaaaatgatcataaatccattttcctgatagctaaaaaaaaattagaactaataaaaactgtaattttttataaataaattcacactgtgtatgctttttttctctctgggttggttcactcaacattatatgcatatattgttgggtgttactgtagattgtccattttctttgctgtgtagagttttattgtatgaatataccaaatgtatttatccattatacaattgacagtcttttgtatagttctcggtttggtgctatgacaaagagtgttgctttcaacatcctaacacatgagtctgacacaaacacctatgggtggaattgctgagtcctagagtgtgcttatattcaatagagcaaagtattttctcaaagtagttgccctaatctacattcctattaagagtacaagagagatcttgttctccacatcctcaccaaaagttgattagtgatccttttattcatttatgtctttctagtgagtgttccatggtaacacctaataaacgatccttttattattaaattaaatttatataatttatttttattgaatttgatgtgcgtattatgcccagttataagtcctgatgcatgaaccacacttgacacgtgagcctctactcataggcccatgcaacctgcttttttttatttttaagttaatttgtaatttttaattgtaatgggttgaatagcagtccccaaaaagatatgtccatgtcctaattctcagaacctatgaatgacaccttatttggaaaaaggctccttgcagatataattaagtatcttgagaggaaaagatcatcctgaattacccaggtgtgtcctaaatccagtgacaagtgtccttgtaagagacatactaggaagatttgacacagacagaggaggaggaggcaatgtgaagatggaggcagaggttagagcaatgccaaggaatgcctggaaccaccagaggctgaaagaggcagggacctgaatctcccgtagcagcgtgacactgatgacactttaattgtggacttttgatctccaaaactttgagagtcaatgtctgttcttttaaaccaccaagtatgtggcaatttgttatggcagcctcaggaatctaatacattgaaagagacaatttatcacatcatctaaaactgcaccagtgtgctaaccagcagccaaatttaaaatgtagctggtccacactggatgtactgtaagtgcaaaatacacagtgaattttgaagtcttagtatgaaaaaagggatgcaaaatatatcatgaatacctttgcatgttattaataggttgaaatgataatatattggaaatattgagttaaatacatcttagtgttaaaattaatttcacccatgcctctttacctttttaaaaaatgtgactactggaacattttaaaatatatgtataactcacatattctattagatagtgctacctaaacaagagtgggaacatttagaggtctgtctataagaattacagcctaactgttgtcagtacatcataaattcattcttttagtctttgttcacccaatgaaagagtagacttttattgggcttctgttttcaagttctgttgcacagattggggtataaatatagagatcctgcattccatttgtgtaaactattggggtctatacagagaccccaatagcagaagagcatgtggatctgctacctgacaaacagaggcattttcctgcataaccctttcaaataggagacaatttcctggccgggcacggtggctcactcctgaagtcccagcgctttgggaggccaaggccagtggatcacctgtggtcaggagtttgagaccagcctgaccaacatgatgaaaccccatctctactaaatacaaaaaattagccaggtgtggtggcgcatgcctgtaattccagcttcttgagagactgaggcaggagaatcgcttgagcccaggaggcagaggttgcagtgagctgagattgcaccattgcactccaacctgggcaacaacagcaaagactccgtctcagaaaaaagaaaaaaaaagaagacaatttcctcagtaaagaaattgacgcttataaataataaaattatggatcagcttaccctagttattgcatgtggaggaatacattgtaaggtattattagttattgctacagtaaagctgcataacaaaacccatcaagcacaatagtttacaacaacatgcatttattttattgttcaggtacatatatgctggtgagttatgctgtgtgctggctgagtttggatccagatagccaggatccagttagccaaaaccagtcacatggtctaaccccaaatcagtgggcagagatgtacacaaccccctacttgaccccactgtggggttccagagggtgggactgaggatttgagaacaattatcacatccactacacaagaaaacatcattttcctcttctatctgactgtcatttcaatagcaggttcacattcattgattatctaagatgtgatcaaattatgcagtaagagaagcaggaagtcagagatgagtaactagctaggccctgtcttagaggattttatggtctaatagaggacacaggtccattatttgacctccttgtgcttcctcatccataaagcagatagcactactgcttgctttacatggttatcctgaagattcatatgaagggcaactcatcaagattataagattataaagatatagctgttgtctgtatctgtctatctagttgtccatctagttatttggtttggccttgatttttaaaaactagctgcagctatattgatatgtgctttggaaataaaacaacatggaggaaacacagcatgttaacgatgcctatatttgggttttggcataatgaagaatttgtttttctttttatatgtttcagtatttcctaaaatttctttcatgatcatctgtgaccaaaaaaaaaaaaaaaccaatatacattttaaaagataatttacccagcgaattggtttaactggggaattctagctccaaaatttgttttatttgctaaagactttgaccaaattgtgtagataattatgcaaacattaatgtttactttgttttcatagctaccaccttggaattttctagaaaatgttttatttttaatatacatttatggatttgatttctaataatttgcattatttttattttaatattacatatgtttaaactataaacaaggaagtcagacatgtttttcttgcctcagccttactgttatttagaattgtcaagtattaatgtttccctttcgttgacaaagatggggtgtgctgccacaggaaacccttgttatatggaggctcttccagctttatttaaattgtgaacatttgtacttaataacacgaacaatgagcagtctggatttttctttttcaagttgtcagtgcaagtaaaggcattttaaaatccgaatctgcttccaccagcagttttgataattaaagtacacaaaatgtatcaaacatttgagataggccaagtattccgttgaatttgttacagatcttgaagtggactcaatcactacttgctacttttcagagaacctttccaggtatactagctaggtatgaatatcagaaggctattaccactgtttgaccacaaaggtaaagaacatccaatagacaactaaattctagatctttctttatttgcggtatgggaaattttttaacatattctgaatcttttattttttgcaactttcactgtctcagattagactttaaaactcaagagctagaataattggtctagcaccatctctggtgtcttctatggatgcgttgcctacagtatattctgtcatcatctgtggttttctaaactgaattgcatttaatttcaatcaagcaattcatgctgtatttgaacttcaggcatatctttattttccagaaagcctgtttatcatatggccactcctgacttcctgaaactctaacagattaactgagaagaaaacaagtattatatttctaaggcattttcagctagtggaaaagataaatgactatatgagtcaataaaaaagtataattttcattgaaaggtagattggaagagcactatcaagacaaaaaaaaaagaatctgtttttaatgaaaatgaagagatctgttttctcaatcgtcatactaaaaaatgagtggtgtctgcacatatttttatttgggataataaaattgaacaagattattgctaagccagcatactaaggaaagaggacatataagccatatcaaatttaatgtaattgccccacactatcttctacaagaaacaaaaacaaaaaacaaacaaacaaaaacttggaaataagatttgtgaagtgcacattgtcttgatgacccatggaatttcaaccagctcttttaaaagaagtttacctataagatgccttagacacaccctccctttctgaatcctgtatgaatgcgtaagagaagaaaaaatgccacaaacagcatgggatgttggaaagaattggggaatgtgagaaatagaaaggaaagattaaaacaatcaaaaatcaaagaaatgtaaagtattacttgagaacatttctctgatgtttaatctaatattctatccaaagctttctgcactgctagaaatgttctgtatctgtgttgtctgtatagtagccattagccacatgtagctgtggagcattggaaatgtgacttttgtaactgaggaaatgaatttctagttttatttcattttaagtgtaaatagccacatgtggctagtggctgccttatgggaaagcacatgttcacagctctacctctcaaagtatgtttgggagtttattagaaatatagcatcttggctcccacccagacctactgactcagaatatgcattttaacaagatctccaggcaagtggtttgctcctgaaagttccagaggccctgccctagagcaatgttcacttgctaattaaccacccattcagaaacactgagaattctttattgttatcatgggtgagtgaatattagcagtgtgttcattttatccacagaggagtccttgatgcaatagggtgagtcataatagtgcttgaactgcttactttaaatcttttcccaaatgtgaacaaaacttaccctgctgattgatctgttgattttcccattcatgaaacaaacagagtccttacatggcaggtggaagggcattaaggtttactcagcatctctagttgcagctggatgtgtaccttatttctctgtagtaaaagaagtcttgacacctgaattaaaaaattatcattaaaaagtttaaaggaaggaaacattataagtgttcgaactagaaaatgatgttgacaatttattgcatttggcccctttccataggtcttaatttggaatcctgcaaaagctgactctgagaaaagcacttgtatacaggtggattatttgaaagtgatcccaggtaccatagtgagtggagtagggggagtgaagcagagaaaggagaaaggtcattaaagtgtacttggatgagtgggccactgatacgaacaactggggttcaacccctcttggggccatctgagaggctgggcatgtaagggaggaagacatcagcatgtgtgggaactgtgcacctaagctgcaggagtcaccttagatggtggacatggtgtaggacaccaacagggtcttgtacaccataataggaattgcttatgtaatgggatcctacccttcatgtggggcagaaaaatatcaatgtctgctggggaatgaaaaccaagatccagggcaacaccatgaatctggtaaaagtctgctagtggtcagtttgccttaggtaggttgttgctcttggccacagggtgtaaaggaggctttggacttagtgatcccagaggttattccctgctctcatgccagtattcttctgcagctttcctcatcaatgtttatatatttctttcttttttctgaaacttgctctttcactctgtctctcccctagggaacactaaaaatagcctgtaggttaaggaatctccaaaacacaggtgtgatttgtttgaaattctgtttgactcatgtgtgttgagttacttctaaattcaaggtattgtgactacttgaatgatattttttagaaacaaaataatgagaaaacttggtctgacaagggagatttttctgatctttgtatgcatttatttatgattatctgaagcgtgatgtaaaataacttatgtatatacatagcacagtgagttctggatggagagaagactaattatttatagaaaaagtctttttaatgtaaaaatattacattgaattagatttagttacatatgatcaaattgtcatttctaaataaaacaaaattctgaaggctgtccttgaaaatcaaagagatgtgtcacactagctgcggggggtgcaaaggtatgctcactaacattaagtaatttactgtccctttggaaggtaatatatattcccctaaacaggaaaagtaagtttgcaagggagcatggtttatgtacagtcacaggagtagggcttgtaaaagattctgtagatattgaggaggaggtatgtgtgagacagagcatgggatttaacatgtatagtaatgacctgcttggagatggaaggatttgagccaagttttgaaatgtgagggttttgtttagagactctttcaggaaaatgaagcaaacagagctgagcatcatcctggtagcctgactgaagagtacttggcaaattagagaagatatagttgcaaatggcagggaagaatgtgaatgctacgcatagtgcttttgggaaatagtccttgatggtgtctcttttacagttgaagagacagaatacacacacacacacacacacacacacacacacacacacacagagtcgcttcagctgtaaacacatatatatgtagttttaaatacatatatgtgtatacacacacacacacacacacacacacacatatatatatatatatatatttttttttttttttttttttttttttttttgagatggagtctcactctgtcgcccaggctggagtgcagtggcgcaatctcggctcaccacaagctccgcctcccaggttcacgccattcttctgcttcagcctcctgagtagctgggactacaggcgcccaccaccatgcccagctaattttttgtatttttagtggagacagggtttcaccatgatacacttatatattttttgtctctggtgtgtgtatatattatgtatacacacacatatataacatacgcacccacatttataacacacacatatatatgtatataacaaatcaaatttgatcttagcactaggactctgttgtaccaataattcagggttttttttttttagttctaggtaaaaacagtgtcattgatttactatcagtgaattcatgcaaattcatatatttgcattggtcgagtgccttgtactacaactacaatgttgaatagaacatgttctctcttttaggggagctcaagatacaggcaaacaaatgactacacttcagagccatgtcataataaaagtgcccatgaaatgatatacaatctaattctaatcagattctccaattgacttgctattttattcctgttctcaatggactcccatgtactttgtaaggagacagaatgtctgagcagagaatctttagagagaaaatcgtcaaataccatcttggataccaaatgtccatcttgtacttgtgaataataattcagtctagcaggatgtcctcttgcaaactgaaatgagcctacagtcccatctgtgggaaaacaagaggactcctaagtgttacacacaggatgttgctgatcttgggtcacctggctagcacagggcagctgtctgcagtcctttacctctggctggatttcctccttcaacttctaaaagtccaaggcttgaggacagttccctggtgaagatcaccagcatcttctgtgggccaactgaattgctgaggtgggaagtagtaaaagtcagagttagggtctagtttgtcctccctctctctcattttgtgtccagctttctttcccaactgccaaccttgatttacagttcagttaagtcccaaaagtagatgcaacagcaacaatcttcagtggacttcaacagttccctcagttttgtaagagtgaattgctctgaaaatccccgattctgtgtcactctaagtggctctgcctccctgatcatgtgtcagctgcattcaatcctagcaccagcccaaccttcaggccacctccaccatcactcactgggcgatgtgttctgtgcttgaatatcttcagaacatgcagatttgtcctaaacaggcctaggaaatgaatatacaattatacataaatttttattttatcgaaatttgttgtgagtaaaatggcagtcccttatctactgatggagtaccttctaaaagctttccttcttattctttatcaaattattcatttaatataaattacttatatatttttatgtattttatgtattttttcagagatgatcatttgggttttgaaaaattatattgtaataaaaaatcaaaatatttacatttatatgaggataattcctttgtccatgaatttatggacttatttaatggtagtctaattttcttaaagcactaaactctagaggcatgggttggctgaaacacacagatgactttgttgactctaacccaactatcctagagtaagattggttctactgggtgaaatgatccctcttctccaatgcttctgataccccatttcattgtctgcctacacagaggggagagggcaacagctgaggtttcttacagtcccaagagaaccatttttaaaactcagtctatataaaatatttcctggatgttttcaccaaagctcattaatgtaattttcacatcattattgcagctaatgatcatgtaagcgttcctgatcatgtggaaaattaaagatgttaaattaaaatattgacactgatgttagtaagtaatgattgtttataagatgtctggatttaaaagctttgtttacttaatttgttaaaaatggaagtttacttgtctttggtgtagaaaattaaacatgtgactctgaactttgtagagtgcttaacagcttttataatacttttataggggatttacatttgttatgggaatagtctttttactgactctgcttatattttcagaaatgtgtctttagccactagccgaggacagaccaataaacagcatccaaaaatgttaatgattatatatggttccagaatttacaatggtttgtgttatgattttttttaattttacagtggctggaaagtgaaacacattcaataaaaactgtatttcaaatacccatacaatgattctacttttcactttcagcacagtattcaataagttgcgagagatattcacatttcactataaaataggctttgtgttagataattctccccaactgtaggctaatgtaagtgttctgagcatgtttaaggtgggccagactaagatacgatgctcagaagattaggtataataaatgcattttgatttataatattttcaacttacaatgggtttatcggaacatagccccaacataagtagagaagcatttttattatagtgattttacatggaggcaatggcaggaaatggaaccagctgttcaaaagcatactttgtttgtaacttaaatgtttatacatccaatcttcttataaagtttgaatttttttaagataactatactagacttaatgttgtggtgggtttgtgactgtccttgattttagtcctcaaatatctatagcagcagcagtttgtatctgaaattattacaaggggatttgcctattagaaatatgcctaagttccattattcattaaggtcacagcagcaattctgattaatggagctgattcttgatagctgtgaggatacttccaatacatattataacttttacaacagagaaagcccttaatttccttacctgtaaaatctgagtaataattcctgccctatgaattgtaatgaaaatgagagaagctcccaaaatgatctagatgagacaatcaggtggagataagaccaagatgctaggaagtcagctagccactttctcacatctagcaaactgctcctacctactatccttgcaagaggcagaactcagatttgtcatttttaaatattcagtgaaccactgggcttattcaggattatttgaaactataaatacatatattttttaaaattcttggattcaaggggtacgtgtacaggtttgttacatggatgtgttgcatgatggtgacgtttaggtttctaataatcccatggcccagatagtgaacacagagcccaatagataatttgcctaccttaactccccaccctcttttggaatccccagtatttactgttgccatctttgtgttcatctttacccaatgtttagctcccactcataagagagaacacgtagtgtttagttttctgtgaaaccataaatattaaatgtaagagtaacaagagtctactgaatagctacagcagcattccttaatgttatctttttgaataaatacaattttgaaagcttcagccctgcacatcaggtcaatgcacttaagtagctaaacaagaatgtcataatttggtgcaagactgcacttcaggtattccaagtatatctgtgagagtagcagaaaggtccaaatcagaagagaaaatttgccatcttcattcagaatttcttaatcttactggaagtacataaaatctgtttttgttttaaataccctgatggaatagaccaatttggcagtctgaaaaagaactaaaaaagcccagctgtccaacaaagtcatgtctctaggaagagacacactgagggaaggatgtaactgagagaaataagacataggcctcagatttcctagttgggccaatgagaagagtgaacagcatcattatgtggagaaagtgaattatagaacctgatcgttatttgtgagctcattgatgtaatgaatttgcttacacagtttatatgtgacaaagttttgtatgtacccacttctccttgtccttaggcaataaattgccaagagtgtacagacttggccttcttgccgagaaaatttgtggaaactgccttttcagaaagaagcaaaaattagtacaaaacattgggactattttttttgttttgccttgtttaatttctttttttaagacagtcaaacccctgagggtgcacccttggaataacagaagtttaggataggaaagagtctctatggtcagcttgccctattgaaggagcacccaagaccatcagatggtctgcagagaaagtgtttatgatgtaatatcaatacatttgtgaaacctcatatgtcataatgctctcttgaagagtgacaattcatattatcatgttaaagactttaagtcctacattaaagaaaacactttaagtttaacccagtggttcccaaacttttttggccaaagatccctttaatccctaaaacctttgcatacttgtaaatgtttatttaatccaagcctgaatttgtctttagtaacttcctgcttaacatatggtccttagacgaacggcatcagcatcaccaagggcttattagaaatgccagttctcaggtccagtcttatatctatcaaatcagaatctgcattttaacaagattctcaggtaaaatgaatatgcatgctgaagtttgagaagcacaggctcagtattccttctgactcaccatcttcacttcgttgaagttaaagacctgctgaggaaatgtcttatgcacagcatttaagcaatattacaactacaggcaagttgtacctgcaaatagtatttgcacatgctgcctctctagtttctgtgatgctgggagatgtctttcagaggcctgagtgagtctttacaacctgctcaatttgttttgtgaattatgagtgatgaaattctagattacaaattgcagacaaagaagtctgtgccttttcccaggcatagcgtcagctggtgaagtttatagagccagatgtatttagtagaaatcagagcgtgactaacacttcaagaagaagatttgcagatgcacaaaaaagagcagagaagtccagaattgcagcttggctttcaaatatgattattggttttttctgacaggtgaaacatttataaggaatcaaaatgctactcattatgcaaaatgcctgcagaaatatctctatcagaagcaactaaaacgtatacagttgacccagacggagaacaagggccccttctcaggtattagaaatggtctatatattgataggggttacatgggtctatgcatctgtcaaactcagcaaattatttaaggtctgtatgtgatttcactgtctatgaattatacctcaataaaaacgtataacgtttatcttatgaaatttgagtgcagctgatattagatacagcaatgtgggctgtcaagaatactttaatggagatgtgcatttggaaataaatgcccttcacctggtatatggagatatttttatgggagggaatagccattgagtaggctgggttccagtgacttcatggtcatgccagtcagcgttaccagcaatccagatggcagagggggctgtagcatagactctgaattattgattctgggttcaaatctgagcctagttcccagtgacccagcacatgtgatttgacctttctgtgccttagtttccctatttataaatggcaatgataaaaatatttccttcacaggaacgtttggaagaccaaatgatttaatatttgtgaagaacttagtatagttctggcacagagcaaacactatatacatatttatcagataaacaaagtgactccaataagctagctgcaaccaccgcaactgtcatctacaacttaaccagttttatttttttacagcacttatccttctttaagatgatcttattttgaataatttatttgcatgtcattgtcagttgcccacccacctacttcataagccccaagacataagggactgatctgttttgttcttccctgtactcctagaacagtgcctgacacacaatagatcataacacactgaatgaatgaataaaggaatgatgtttaaagcaaaacaggttcttaaagaagtgagtcctatgatattaatgttccaccaaaatcatttccttaattactggttaaattgttatgtgcctatcctgtgtgctgagtggtacgtaaacagcttactggggatgaggtatctggattgatatgaccaaggaaatttcttgagtgagaaggagccaataattggaaaacccctgattacctaatgcttgtagcatgtcccaggatctgaagaattttttatatatcaatattttgaataaaattcgtatttgtcctcagagagacaaaaacttctgcttttaagaatactcagaagctaaactaagacattcattataccatctaattgtgctagattgacattttttccttcaggataataaatcaagtaagattaagcaatttatactatgactgggaggaaactcaaattaacaacagactagttctgccccttaaatttggcagatgctctatttccattaatctctgcacctggcttcaaatttcatgaggcagggtcctaatcacactcatctatgcatcgctcagagcttcctagagtgtcttgtatttaatacacacaataaatagatgagcaagctaaatgaattgaatttgaaagtgtaaatacatgcacaagagcttgagaccaaggatttaaagtaaggctttgtgttttaccaagactgccctctggaagaacagaggggtcacccacacaatctggaaattaggctcactccttccattttacaattccttattggccttggtaggcctacaggttattctcaaaaacctgacacacacacagaaacactcccacacccctcctcccccaccacacacagtgtagtgatggatttacttcaaggaccatgagttacgagataagccacacagagcagagcaagagtgtacaatactgaaaaatatgttgtggtgaagattcatgtttgagtcataggacgggaatccagatgtttatttttaggggtctcagataacatatctttacatttgaaaggcaacagggtatttgtttggttacactataagcatgtattattttgttgagactaaattacttttttttatttctatgatgcagcactcttttagtatggagaggctcatttggcaattccctcacctttttagtagaaatgaattttgatacaagaccaaatgagtgtctctttcttttcactaactcccatgacctgcattctgagttgttgttgttttttaacttgagatacatgagtcctctgtgctgcattctgtcatccccaatatcatttctacagaatgaattgagcaaagatggcctagcattcgtatttagcaagcaaatactatgtgtttagcaagtcttccaccaaaatacttagaaagatcatgttaacagtagagggtggtgactgcaagttgtccaggttcttggcgttttgcacaaagaattggacaaaacgtctagcagagcaaagaaagaatgaaggaacaaagaaggaaagcagggatttattgaaaacaaaagtacactccacagtgtgggaatggactcgagccacaagcagcagctcaggggcccaaatacagaatcttcttgggttcaaataccccctagaagtttcccattggccacttcgtgctcacctcatgtaactgaagcagtagcctgcaatcggtctgattggttgcagaaaacagccaaccagaggctgaagtgaagttacaaaggtcacactcccgtgcaaacatctgattggttgctttttgcaaccaatgacctgcattctgaggtgttttttttttttttttaacttaagatacatgaatcctctgggctgcgttctgtccttggctgctttttgcaaccaatcagaggctagggtgaagttacaaagttgccaaggaagactggacctgcaatcagtctgatttattgcagacagccaacttcccatctgccgcatagaaaaggtcaacttaggcgtggaaagttagggttttcctttcaatttagttccaggaaattggcatgaaacagtcttaggttccctgcctccaggccctattctcctgcctcaatcatgttatctatggcagtgcttctaaaactataaagtgcatccacatccctgtatgtgccagtgtggattcaccaggtctagggggcacctgagattctgtatctcaaactgggccctgggtgttgctatagaccacactctgagtagcaaagttctaaagggaaatatatttatcacccttccacaaacggattctatttaaaaaaagaaaaaagaaagaaaagaaaaaaatcatgttatcttccttaaaacatagtttcatattctttgcctctaaattaggtgactgtaaactccctaggcaatgaggagattcccagctatggtggtctaagtgcaaaacaattttttccacaccatcagcagcaatgtccacgctcattaaggctgtatttctggattttcctttgcaatgggcttccatgttagatcttcactacatccaatttcagaaaaaaaaaaaagttttgagaaaagttctccatgtgagagcacttctgtgctgtttttgaaacttccttctcatttttctggtatcttccagcaggcaatggggaaacctgcttaagctcacccctctttcactttgagctttatggtgacacttttctggcacatatgtcagcagagcccactttttagctgagttgaaaggaacatgggaagcactgcttcatttctgcctggaaaagccagggacacgatgaaatgtgattttgtttcctgaaacgtggaaggatggttggcgaaaaatgaaacatagcacagccatcgctcttcactaagggccaactccttgagaaatgtgctactttaactctcagtagtttctggacaaggcctaaaatcaatcataatcctaaaagaaaaaaaagttctatttcttttccagtggtatttcagagaataggaactctgttacaatttgatttgcactctgttcgcagaaaaccgaccacgcgcactggttttgcttattggtatgtttggatacacacgtgcgtgcacctgctcagaccacaaaattgaagctcagaatggaaaacagaggtttccattgaggtttcagctaaaataaatttaaatttaagcctttctttgccagtttgtgcttcaaaacttcagaaagtgaggagatgcaggtcaaagggcacagagcagcagatatgtaggatgagcaagtctagaaatctcatttacaacatgaggactgtagttagtaaaactgtatggtattggggttctttgttaaataagtaggttttagctgctcttgtcacagactcacaaagtaaccatgtgagatgatagatatgttaatttgctttaaagtagcaatgattttactgtctgtgtatctcataacatcgtgtcataaacctcaaatatatacaataaaatatatttaaaaatacatataggctgagtttttcaggacatagaaaagaaatatgaactggatgagaatgagaaactcacataaaatggaagaagattaccattattattattactttgagacagagtctcgttgtgtcacccaggctggagtgcagtgtcgtgatctcagctcactgcagcctcctgagctcaagggattctctgacctcagcctctcaagtaactgggattacaggcacctgctaccacatctgggtaatcttgtatttttggtagagatggggtttcaccatgttggacgggctggtctcgaactgctgacctcaggtgatctgcccgtctcagcctcccaaagtgctgagattacacgcatgagccactgtgcccagccagaaaaagattattatatcaagatggttttataataatgaagaatagaaatctggacatactcagatttgtagcatagactgatggacagtcctgtttgctctcccaagcagaaaatctaaaaggaaacctggcttctaagggtttggagattcaaaccttgaattctgattctctaattacaagtggacttcagtgagttaaaaatacagacatcagctggaacttgaatggagggtaggggctttgctgggagttgcctggtgagggaaatattttaaaaagactttgagtaaaactgttgtaagaccaacaggttcgtatgcccatttgcacagtaacaaatcatttgcagcagagaaagagtttaatcattgcaagtgcagatcagggagataagaggaaaccctcaaatccatctccctgaaggagttctgggctgggatttttaaagggattatgaagagtgaggggctggaaatttgggattcttgattggttggagtaaggaggataaaatcatcaggttttggaaaatgaattatttggtaagtcagcttctcttggagccctatagaccagctggcgtcagtagttttactggtatgcaggacctgaaagaatatcttaaaggaaaaactgaatgtttcataatgttcaagttgttatctgtacagcagttgagggaaactatatcttgtgtaacagggtctatgtgattctagaacaatacacaaacatctatgaggaagcaggtcagaggaagctgacctaataatttgtgctgaatgtgtggcaagtttggtttattttcttcccccacaaccttcttccctgattaattttataaagtttatagggatggtttcaaaacaaaggaaaacagatacaaccaggttgggtccaaatgattcaggacattctcagcaacaacagcccccatgacttgagtctctctaataaaaaaagaaaagaaaaaatctgaggacaactgtaagggtagtcagggttttcattttttttttttctgtgacagagtctcactctgttgcccaggctggaatccagtggtgcaatctcggctcactgcaacctctgtctcccgggttcaagcgattcacctgcctcagcctctcgagtagctgggactacaggtgtgtgccaccacactcagctaatttttgaatttttagtagagatgtggttttgccatgttggccaggctggtctccaactcctgacctcaggtgatccacccaccttggcctcccaaagtgttgggattataggcatgagccaccatgcccagccaactgtaagggtttttatagatgtgtttacataaaagaaaatagcacagggaaaaagtgtgcagtgtcaataaatgggacaggattattcactcctggtttgtattccccatcccaagagaacgacgatttcactgcaaaggcattttaagagccatgtagaggaattgtggccgattgaataggaagttctacctggttcaaatgagctcacatctctcggggaagctggtgactgtggacccaggtagtccaggtcatctttgagaaatgatggagaacgtagtgtcagaggtgaggggattctgtggcctccatctagcattctgcttggcatctcctacaaaaacttctcagaaatatgagaaatacaggggaaaatgtttgaatgctatcccatggcagttaatatggaatctgttgtggtttgtggattagttgtgtgattcaggtgccattggaggtttctggaagagaagggccttttaaaagcctctgagaggccagtattatccccagaaagaatgagaggaggtttattgtatgcacgcaagcaatatctatgaatccctttacttgcttgtatcttaccctcttctgccctaggaacaggctcgtgggagaagtgacccaactacaccttcctgccagtctcgagcattttaggtgttaaccaccaaagtggctgacacatgtacttactcacttggttttaatttgcagagtaggaacaatggacttagatttttttaaacttctctaactctttaatcactgaatgaaataactcatgttggaaagacaaagaatttcctggtagaccttttgaacaagagctcatagatttcagtgccattggtagccaatgtgataccatggcattgttgtctattgtgttttttaggttgtgacctatttgtgggttatgaattcaattttgtggattgggacctgcaatttaaaaaaaagatgaaggaaatagaacataatagagtcaagcgccatgcaatacaaaatgtcagaggtatcccaactaacaagggtgaatgatggtttgtaaaacttcagttacgtatgtatacgtgcatgtatgagtgttctgagtgataatataaaatgcattttttactgaggagcatgatcagaacaatatcaaaccattgaccaacatcaacatatttctattagaaagatatttaaatgaagtttgtatagtaaaaggaagaaagaacactaaaatatttgcaaatctaccctgcacagtcactttaatcttttcagcttctaattgagatagatgctctatattaccctgtttattaataaaccctcaaagatctaaaaaggtgaattaactctcaggggctttaacagataaattaacttgaacctgcctagttgtctgtttcagagccagaattcgaacatggattcattttagccgcagtaagcacctgtgttagtcagaattcagtgtgggtaacagaagggcaggccagattggagagagctggaaacatattccaggtagagacaatggtgcctgatgaagcctaagggtctgaatgctggagtaaagccaggggttatttacactgtgactgggtgtgaatctacagatagatctgaaactagaagataagcccatgaaggaaatgggaaaatgtgccctgattttgagttacattagcaaaaaaaatcaaagctgagtccaagatggaagaacatctacataattagagaggacagaagtgatcacgaagacctaggggacagggagaggcctcaggtaatgcaaaatctgtacataatgattgaggtcaggagaacagatgctcttcccgggtcagttttaaggctgaaatgtttcaggaaaactgggaacaaagcatggttggaaatagcaggctaagctgatgcatcaggagactgcagatctcagtgttaccttgcctgggaacaggatgggccccaagtatggctgagaatgcaagtctcatgggtatatgtttaatgaacctagttgggagatgttaggaggaagactggttctgatgtgaaagtttccttccaaagaataggccaacctaactgcagcagtgctgattatgatggaaatttcctattttgattcttcatcaaaagaaagaagagccggtaccatggttcttgcctgtaatcccagcactttgggaggccaaggtgggaggatcacttgaggccaggagtttgataccagcccctataggaaacataacaagaccccatctctactaaaaattaaaaaattagcctggcatggtggctatgtgtctttagtcctagctactcaggaggctgaggcaggaggctctcttgagcccagaagtaggagacagcagtgagctatgatcacaccacttgcgctctagcctgggtgacagagcaagaccatgtctcaaaaaaaagaagaaaaaggagaaattaaaaagtttttccttatggtttatctttagtagtttgacgtattaaagaggtttatattttattattatatatgcattaatatataatcagatattaattaaatatgtattagtatattatacattaacaaacttacattgtcatcttcttcaactaattctaagcctcaaacgaagtgtaaaagaaaactgaagcatcaaaaaattagtcagcttcaggcactatcccaaatgttgaagttttccatgtaaataaataaaacctctaaaattaacaagaggctattttcactgttgcctgttggacacaagccttaattatgacagtgatctgaatagccaagttacactgtaaggctgtttccctgaatggaaacaccaaccttttttgcttttttgaaaaagaagcagaaacagaagcagaaggagagggagagggaaaagaattctttcggacaaaatgtatcaaatgtttgacttcactccagaggcaatttttaaataccaaaaattgtttcacatctattcccaataaggtttgccaccaaaggagtttgctctaaatttgtgactggatgtttggttttcagaggtttcaggatttcagaatcatggtaagggattatagacatgtatttggtatgtgcaatattgggggacttgaatattaagtctgattgggaacatctctgggtttctgtatgtgtacacattctacacaatagtgtaaagttttctagaaaatttagtgtcagcaaaaattacgctggggtctgagtttttatgtgagaatcttataaagatcaaaatattagctaaaatttaaaatttgagttgaaagggcttgaatgctgtattagtctgcttgggctgccataataaaatgctgtagattaggtggcttaaacaacaaacatttcagtttggaaggctgggaagtccactatctgggtgctggcaaggtaggtttcagaacattccttcttttggcttgtcggcaaccaccatgtcactgtgtgctcagatgacctcttctttgtatgtggtggtgggggtgggagctgggaggtctctctaatatctctgttgtgggatttttccttagttcagctgaagacaggggtccttatcacatggccacgaaaaatctggcttgcagacaatctgaagcgtgaggagggccgggtttattgggtgaaagagggaaacagggacgctccgcaaggccagaatccctgctacagcgcttcctgcctgaagattgaatcccaggttccacccaggaataggaggggccaggcttcccccgctgcaaacagcaccaactcccgtggctccatgccagtgcgcaatcctcccagtgtgcaggctggttggagtttttccaaggacctcttcccacctggctgtctcatctcattttgtaaggacataaatccaatcctatcctatcctattctatccgagccccacccttatgaccttatttaaccttaattacttctttctagaccctatctccaactactactgctttaacatgtgaatctgggagtgggggagaaaattctatccttagcagatgctaaaactcaggacttgaaactgctttaccaaatgattatgtgctgtggtctgaagcagtattattttttaacccagtgtttttcattcccatgtttttttcttttctaagaaattattttcttcaggatcaaagcgacagaaacttagaagtggcatttgaagttgccaacattaaacctttgatcagtccggcctagtcaccagccaaacaaggaggagagagattgttgctcatccatctaaattcacagctcaaaggtgcagaaatccagctggagtagaaaacatttcctgtactgagttaaatttaactgaactccatgcctggatgatttctgccagtggcgcccgtgggattgtgtgaccccctctggctttgctatctgcaggtttcttgatcacacgtggtatccatttatcagtcctggctggagccagtttcccagagcaaacagattcaggatgatccgcactatcagcagaggttcaccaaagttctaattagaccaggaaggtttattaatacaattagctttagggaggacagttacaacaggaagcaaattccttgcagcatccggtcctctcttagccatgttagttgattaagaggaaagcctcagacttcaaaatcaagagcaaaattgaaaatgtctgggaatttaactttccagtaactgtaaagttttaaccgtgaactttctattaactgtaaagtataatttaactttctaataactgtagaacaagaaaggattctagaaaaatcttgggaaaaattattaatgaggggcctgagggcttaagtttggggagagtgggcttcttttgatttgcaatgtggaagctgcttttgctcatgctttctgaagatcttccataaagaggggaactgcgaattgcaaagtaaagcccctgctgtggagtgaatttgcttatgtcacactctatctgagtgacccttaggaagttccctaatctcccatgcctgttttctgggttgtaaatgcaagtaataaaagtaactgcctcataggtttgttgcaagtattaaataagaaaatttataacggacataaaagggagttggcatagagttaatgttcagtaaatgacgagtgtatccttctcctcttcctcctcctcctcctcatcctcctcctcctcctcctcatggacaattggtttcatccatctgataatgaaacactgtgaattgcccccaggagtgctttaaatgatgtctacttgtacatagatgctcaaaatttttgaattctatcagtatgacatctagaagagtcatgggtagcaccaagggataagctctttctctggaagaatagtacatttctttctattaaaaaaacatgaattagtcaacccattatgtgtttgttttttgcccttattaccagaaaactacaagatgattttcaatcacagtgaggattagtttctgtgactaacatgtttctttctttctcattcttatgagtttgatttcccattcttaagcaaaaaagcacaataggtgtgattgtgtgtaccatttttttgaatgaggcaggaagatagttgacagttggttaattcatgtattcattctagttagttttgtgtctgcacttccttctggaatttaaacatttttgaaaatacggtctctgttctattttttatttttcattcctataaagttttattgaatgcctatatgtgtccaacataccagatcctaaggtttcacataagtcagattggtctctgtccttaatggtgttatcatatagcagaggacaaaatcataaaataataataatatatgaaagatatgtaagcatgtaaggtcaagagggtggaaatttcttctgtcttattcactgctttattgctactcctaagggagtgcctaaaacagattagatgtccaattagtatttattctatcaattactgtcccaggcattttacacatattagaaatatgagaactaatgtttattgagcaattcatatctgtataccaaacattctactggtatttcaacaccgtgaactagaaacaattactaaggttatgaaataggagttaacactgaagtctagagaggttatgcaatttgcttatggtcacacagctaataagagctagatagaggtctcctctagagctcatgagcttaaccagtacctccatccatgacactgtcttaccctaatactggaggagttgaggaataggcttccccacatcgtggataataaagctaaaattttctaaggcagggcctggttaatggagggcacatgcaagctgacactctcaggactccaaagtgtacacacttttcactataccacacagcctctcatgcacgtagacaatcacacacatacaaacattctaacaaaagtttgtaggaattgtgctgggaccatgctgtatagctgtagtccatggtgtataacatgcctgcagtagaatatctattgaaatgaatagagctacaaggttaatccattggagaaggaatttggtgtgatacttacaagctccccagtggcatgaatgtgtcactcttcacaacactgcctagttcttgtgtagatacactataagcattaagacaatttatccttactgtacaagactatggagtgtagatgtggtagacctaattctgagatggccttcagaatcccatccgttggtgtccatgccctgcccattaagtgtgggcaaaacctaaggtttgcttctacccggtagaatatgacaaaggtgaagggattttgcagctataattaaagtgtcatgtcagttgattttgagtaaatcaaaagggagattatcctgggtgagcctgacttaattaggtgaaagcccttaaaaaaggaactgggcccttctggaggcaatagactgttcttgaagacttgctgaagttagtggctcttttggagaagcctacatatcaaggaaatatgacagcctccggaactgcaagcagcctctggtatccaaggccccaacaaaaagccagagccctcagtcacagagctcaagaaattgaattctaccgtcaacctgaatgagcttggaagtggattattccccaatcaagcctccagactttaacccaatctggctgatcccttagttacagtcttatgagacattgacaggagagtgggtttagacgttaatatcccatttccgttaccagatatactgcaaagacagagatcattttttcaaggaagttgtgactaagcaccatttgaaatatcactattgtggttttgactgaccccagatgaaaagatgaactctcctaagatttcaggcatctttaaggatagattgtaatgatgccaggtgattcctagatgagatacactaaaattcctctccacacaaggaaaataacagtgtgttctctacttctcttggaagttccatcattaaggatattgaatatgaccaggcacagtggctcacgcctgtaatcccagcactttgggaggctgaggcaggtggatcagttgaggccaggagttcgagaccagcctggccatgacgaaacctgtctctactaaaaacacaaaaaagttagccaggcatggttaattagccctgctacttgagaggctgaggcacaagaatcaagaatcactttaacctggaaggcagaggttgcactgagatcgcgccaccgaactccagtctgggtgacagagtgagaccctgtcaaaaaaaaaaaaaaaaagaatattgaacatatgtttacataaattaattattttgagcaatgactatttctgcttcagaaaatctggacttcttaagttgtgttcaagaaaaaaaaaacaagacaacaaacacttcaggtttatccttttatgttgtgactatgtgggaagagattgttaatttaaaaaatctgttaacaccaaactctcttttttctcttttcctcttttttttctctcttctctgtctctcctcattttataggttttggtgtctatttattttttctccatgtattgccaccctttgctctaggcttacatacttttaactacaaatccaggaaggatccctgattccacctgttccagtgaaaaccctgatgtagctttcattagaccaacatagaatatgtgccaacacttgacctagccaccgtagccatggaattttatttatttatttatttattattttctgaaacagagtctcactctgttgcccaggctggagtgcaggggtacgatctttgctcactgcaacctccacctcccggtttcaagtgattctcctgcttcagcctcccaagtagctgagatcacaggcgtgtgccaccacacccagctaatttttgtatttttagtagagatgagctttcaccatattggccaggctggtctcaaactcctaacctcaagtgatccacccaccttggcctcctaaagtgccgggattacaggcatgagccaccgagcctggtccgtaaccatggattttaatgatctgttcagccaggcctggaatgcacgccttcccctgtagccaggagtaaaataagcctatcagaaccatgcaggctggagttacattttcaaagaggaaaatggataaaaacgttccattactgagacaacctcagatattttcctcagagtggaaatcaggaaaccaacttagagtcatctcaagattagagggaatttgggctagaaggagaatattctaaagctactatttactaaaatattacctaatagtacaggaatagacaactgtatcaatggagtagaagagattagaaagtgttcaaacaagcataactcatttagaatggatgcatgaaatgctatttcattgtagcactattgttttagaaatggttttattaaactatacacaaatatatgaacacaaatccattacagtactgagtagtggaatcactatttctcaaataactagtcatccagtacagtagactgacatcttactgtttttaccatctatttgttctctctggtatggtgtttatttctaccattatttgtacttatatgaacatttttgggctgagatggctatcaaaaatgtgcaccagagtggcaaagaaaaattccctattcaatataaaaataccacttttactggggctctgggaaccttcaagacagtgagcaaggaagtattaggtaaaattaccaattatgtagctaattagatatgaggggaaatccttgaaaacttagtaggccacatacatatcactgcagcctctaaagattgacaagtagagggaaataaattgccaataaatgatactgagaatatatgtccaaacagactatgccattataaggtaatcactccctgaaacataaaaaaagtctattttatgaattttatatacttatagtttattttattatttgtagaacttttaaaatttatatcttcatatatgaatttcatttttattttgtgtgttctatcttatatatttgtagataatttcataaatgtttatttttgctagttaagcatctgatataaatgacatttccaattaatagtgaaatggtgtttccaggaaagatattggaacaatgaatatccgtatataaaagtaattttggcaacctacttcacaccatataagcaaataatttccatattatatacatacctaaatattgagggaaaaccaaaattgctagaatatacataatatactttttataactgtagagtgggagaaaacatttttagacatagcgcaaaacccagaagcaaagtaaaacactggtaggttatctgcttaacactgttaaacttctaatgggcaaaagacaaagcagacaaaggtaaagacaagttacaggctgggagaaaacagttacaagatatatcagaaaaagggaaacatataccatctctaacatactcttacatggctcttacaacccaataagaaagtgaagttctcaggtatctgtgaatgcaagccacagttgtctcttagccacaatgtctagggtgcgtcaggattcagacgactgcagttcctggccaagtaccccctagctttgctgaatgacatgcctctttatggcttatggacagcaaccattgggttcaggtctttgccccatttcctgacccaaggggccacaaaatcctttgtcctcaccccaggccacaagaagagcatctcctcagaaagtggccactggttatttcacctggccccaagacgatgcaaggcacccactctgctttttttgtgatgagatggagcatgactggccttgcacatgaccttcagtcactgcctctttgctctttggttgttgactttgtcggcagggaattcagagggaaggagagtcagcgacgtgctctcgtaaggtcatcttagaagaccactctctccaattattttaagcagctctttagagctttctacattgtgaagttctttatcctacctgtgtatccctagggctttacagagtggagattcagtaaatattttgacaagagtgagcaaatgatttaacagtcgatggagtgcaaattgccaacaacttactgtagcgtttccatccacagcattcagggtcagtggctaaaatacttgtcgtaaaggtgccaagcctccaggcatctagcagggcattagcacaccgaagcatttattagactcaggaatatactctttattggctcatttcaaacaatacctaaaaaagaaacctctttttttaaagccttcaaaagatggcaggatgtattttttcctaagacccataaaacaggtaacataaactgttactatttcataagaaaaacttaggtacagaaatactcaaacacttatccaagggagctggaatttgtgtcaaattttcttgaggaattacatggctcgtactatttagaccatgttctaaacaagcatttatcgctctttgaagttgtgtcgtatttagaaatttagattcatagtaattagatatttagatagattatactggaatatttgggtggcatatggacagcaggtctgtaaataaaatttaaatcttcattactatattttctacattctgccttatgcttgatttaagcttttttcccttcttttcactggttagatttttttttcatttattttttcttctaggtcgttgacctttttataggcatagaaaatgccttgtaccgtgcaccaaagttcttaaaattttaaaagctttctttgactaagtcatcccttgccctcttttgaagctattctgacctctattttctattttattttaattaatcatatcttaggatttgtaggcttatatgtggatgcatgtatattatcttgttaagggtacataaggcagttatacaaaagattatgttggcttcaaagaatgttaaacaaaaggaatgagaagattcctgaataatatagttatgcatactcagagcttctttcataagggcatttgaaatgtatgctgatcacctcaaggtcgccatgaaatgggaagatttaaactagtggtgtttggacagaaacaacttttaccttgaaagccagcaatcaatgactgaaaaatgtatatctaaggctggaaaatcatttcagtattattaagtattctgatgacaaaaaaggttcaaacatttgtgactcccatagctagtattgatatgggtgatgggaaataaggatgtatttattttatttggactttagtcatgtttttattgtctgtaaaaatgacttgactgttacagctagaacattgaagaaagaagggaagcaggtcaaatgggtccccagtgattccctgtggcacctggactttctccaggaattgattgttacatattattccatcaaacaccttttaaccagtccagttcttgtctatggatccagacaattcagtcttcccagggcttacccatgtttccatatatccagaaagtttgtatattatggctagaaaagcaattaaaccactttggaagggttgggggaagggagggttagggagagacttgttaaaggatacaaaattatagctagataggaggaataaattctagtattgtatagctttgcaggaagactaaagttaacaatcatatggtatatagtatcagatagctagaaggaggatatttaatgttccccacacaaagaaatgataaatgtttttgattttatatatatatatatatgataattaccgtgatctgatcactatatgttatatggatcgaaacatcactatgtactccatgaatatatacaattattatgtgtcaatttaagaaattaaattaaaaagagaaattaacccagcctcaccattttacagcagagggacttgaggtggaaaaaattcaagaaactttactctcgtcattcaacggagtgatcttttgaaaaaggtagcattacaagaaatccagtatatacccacaaatacgtggccacatttcttgacaatgttccaattattattgatatctacaattagaattaaatcgttgtttctaaccagtaatattccaagtaaagtagtaacattgtttattcattggcattaggcatctatggttagctctacagaattatagttgaaatctatgtgaaaatatcaatttttacacttaccgaccataataggatacttacagaagagcttgataccagactgtcagccaaagattttctgaatttggtatgaattttctaaaggtggagtgatttgcttcaagagaaaattgctttgagtgcattttgcagtcaagaactttgacaccttgcaatttactagttgcaaagataatctgatcacaaagtaagaaatctgatcgttgtaattccaatttatatcaataagaaataataaataatctttattttggaggtttgctaagtgactgaaagtttatctaaatacagacggttttgcatgaacgctagggactgaatgaaacactgtttgcctaccaattaaccaggcaggtgtgaaacataagcagtgaccgaccataacagacgatctctcagatattgatcactcttttaacagaaaaattcctatgggcagatagaggagggggagagggcagcattctcttgagattgtcttagggaaggatgatcatgaaactctttatatctgaaaaaaattttaaatccttttaaatatcaatccaggaggattagctaagcagcaataaagcaccttataactgttacatagttaattcaaagaagcattgtatcaagataaataaatatagaaaacaaggaatccattttcaagaaacatactttgttctagttctgacttcagatttaaaacacacacacatacgcagaagacacactgaatatgattgaatctagaatatagaaataaaataattgaatatattccatttgttaatgtgtgcatgtgttttcaagacatggctcaatgattctgtagttttttccttatttttattttgagaattttctagaaaaaatatgtcttaaatacttaatttttacttcttggttatcttagtccatttgtactgctacagcagaatacatgagatgataatttctaaagaacaggaatttattttctcacagttctgaatactgagatgttcaaggggccggcaggtttcgttgtctgtgagggtggctctctgcttccaagatggttcctctagaggagggaacactttgtcctggcatggtgggatgtgggctcaaaccctgtatgaagcctcttttataaaggccttaatctcatctttgagagaggagccctcataacctaatcagctcttaaaggttctacctcttaatactatcacaatggccattaagtttcagcatctgaattttagaggggacatactgaggcaataacaaacattatgtttttgagaaggtcccattttttcttaatttaaagctcagtccaatgaatatctgtaacaaagggttagtgaaatcccagtccaaaattatcatcttttgaaggtaattcagatggacatttcttgagttatcaaaatgtataatattatctattcaaatcttttctgttttattaattaaactcaggagattaaagtaccttgccatgacattgaaactagtaaaacagccaaatatgaaaaccaagcatgctgggaaaatcctaataatgatggaatggctaccaagtctttgttattcccttggatagtagcacaccttggaaagacttagcaaagcccagatttcaggaaagtagaaaaattgcatttaatgctttgattataaaattatcttgtgagtttcttgtttttttttttgtttttttttttgagatggagtctcgtcctgttgcccaggctggagtgcagtggcacgatctcagctcactgcaatatctgcatcctgggttcaagcgattctcctgcctcaccttctcgagtagctgggaccacaggtgtgcgtcaccacacccagctaatatttttgtatttttagtagagatggggtttcaccatattggtcagactggtcttgaactcctgacctcgtgatctgcccgccttggcctcctgaagtgctgggattacaggcgtgagccacagcacctggccatctcgtgagttttaatgcaactggcagttgactgtgggtcctaaccatgggctctgtttttctcaaatgtaaaattattggccgatgtggaagaccatccatcctgtagggtgaggccctgctttttataaggtaatggaagagtatgctattcaatatcaagttaaaaataacttttaccagtgtggaaaagaaatgagcagggaaacctattgaccattaggcttagttttctgtttggtgccccaacttcactccatctgctatcttttggatctccagggttttctttcctactccttaccccagaaagctgcattattctggctccctgagcaactgacttcagtctgagtttcaccagtgggaggtgctgtcacgctattggagggcagaagaagagcagcatgaaatggttatttggttattccctattcccttctgcttctgcatcacatttctggcaatggctgaatatctccctaactacagctcccaacaggcaacctctctttcatggttccagctcttaccagttacaataattctatttctatcacaaccccttcttccacccctaccccaattcttccagtccaggggtcacaatagcaccccacagtggctatttcctgggtttaccaacttcttttgttggttcttccagcctgcttacacctccgacttttttcctcattaaagtctcttcacttaatttatctgatttgaatttgtctctttactgagatcttgaccaatacctgattttttttttgtactttaagttctagggtacatgtgcacaatgtgcaggtttgttacatatgtatacatgtgccatgttggtgtgctgcacccattaactcgtcatttacattaggtatatcccctaatgctatccctcccacctccccccaccacatgacaggccgcggtgtgtgatgttccccaccctgtctccaagttttctcattgttcaattcccacctatgagtgagaacatgcagtgtttggttttttgtccttgcgatagtttgctgacaatgatggtttctagaaaccatagcttcatccatgtccctacaaaggacatgaactcatccttttttatggctgcatagtattccatggtgtatatgtgccacattttcttaatccagtctatcattgttggacatttgggttggttccaagtctttgcaattgtgaatagtgccgcaataaacatacgtgtgcatgtgtctttatagcagcatgatttatagtcctttgggtatatacccagtaatgggatgcctgggtcaaatggtatttctagttctagatccttgaggaatagccacactgtcttccacaatggttgaactagtttacagtcccaccaacaatgtaaaagtgttcctgtttctccacatcctctccagtacctgttgtttcctgactttttaatgatcaccattctaactagtgtgagatggtatctcattgtggttttgatttgcatttctctgatggccagtgatgatgagcattttttcatgtgtctgttggctgcataaatgtcttcttttgagaagtgtctgtttatatcctttgcctactttttgatgaggtttttttttttcttgtaaatttgtttgagttctttgtagattctggatattagccctttgtcagataagtagattgcaaaaattttctcccattctgtaggttgtctgttcactctgatgatagtttctgttgctgtgcagaagttctttagtttaattagatcccatttgtcaattttggcttttgttgccattgcttttggtgttttagacatgaagtccttgcccatgcctatgtcctaaatggtattgcctaggttttcttctagggtttttatggttttaggtctgacatttaagtctttgatccatcttgaattgatttttgtataagttgtaaggaagggatccagtttcagctgtctacatatggctagcaggttttcccagcaccgtttattaaatagggaatcttttccccatttcttgtttttgtcaggtttgtcaaagatcagatggttgtaaatgtgtggtattatttctgagggctctgttctgttccattggtctatatctctgttttggtaccagtaccatgctgttttggttactgtagccttgtagtatagtttgaagtcaggtagcatgatgcctccagctttgttcttttgacttaggattgacttggcaatgcgggctcttttttggttccatatgaactttaaagtagttttttccaattctgtgaagaaagtcattggtagctttatggggatggcattgaatctataaattaccttgagcagtatggccattttcatggtattgattcttcctatccatgagcatggaatgttcttccatttgtttgtgtcctcttttatttcgttgagcagtggtttctagttctccttgaagaggtccttcacatcccttgtaagttggattcctaggtattttattctctttgaagcaattgtgaatgggagttcactcatgatttggctctctgtttgtctgttattggtgtataagaatgcttgtgatttttgcacgttgattttgtatcctgagactttgctgaagttgcttaccgaaaaaagtccaggaccagacggattcacagccgaattctaccagaggtacaaggaggagctggtcccattccttctgaaattattccaatcaacagaaaaagagggaatcctccctaactcattttatgaggccagcatcatcctgataccaaagcctggcagagacacagcaaaaaaaagagaattttagaccactatccctgatgaacatcgatgcaaaaatcctcaataaaatgctggcaaaccgaatccagcagcacatcaaaaagcttatacaccatgatcaagtgggcttcatccctgggatgcaaggctggttcaacatatgcaaatcaataaacgtaatccagcatataaacagaaccaaagacaaaaaccacatgactatctcaatagatgcagaaaagccctttgacacaattcaacaaccctttgttttaaaaactctcaataaattaggtattgatgggatgtatctcaaaataataagagctatttatgacaaacccacagccaatatcatactgaatgggcaaaaactgaaagcattccctttgaaaactggcacaagacagggatgccctctctcaccactcctattcaacatagtgttggaagttctggccagggctatcaggcaggagaaagaaataaagggtattcaattaggaaaagagggagtcaaatcgtccctgtttgcagatgacaattgtatatttcgaaaacccaatcgtctcagaccaatacctgatttttaagcctaaggttaggaacacataggaaaaatcaaggtgagtattaaaaattagtagaaggagaccgtttagtgtactactcagattagtagctctttgtacagtcatcctcaataaatgggtgcttctgatgacttacttttttttctttctttctgataaattgttcttattaaggaattctattaagtcatcatggaagatgttatcttctaattttacttgatgcacaatttggaaatataattagtttactgaataatatcatcaaggttcaaagaggactcggtgatctggaattctagatacgtagaatagaaattctgaaattgcatgcaaatcttaagtatgtgtgtataaatatacatatactgagtgatttgctttgcaacatggtgatttggctgtttagaaatattaatgatatttgaacatcattaaatgaagtcaaaggccagctataccctgcaacagtcagaccacatatggtgacatgctgccacttaggggcactatgataaacaggtaaacaaccaagagagctgtgtggcaactagtttcaagctcagggttttaagagctagatttaggggcctgggttttactcacatcttcctccggtgctagctgtgaaatttggacaagcagcatatcttttgctcatctctgaaatgggagacctaagaccatgggaatactcattaagtgaatgtacatgaagtgatgcctgacacattccaaaaactctccagacaatacctagaatactactaataattaccagtgtgtaattggtctggaaaccacatgttgtgagtaacagtctagggaactgggaacaattcagtttatggacaaacatactgagggatagagtaggccgctttcaaaatgtgaaagattgtccaagaggagagaaaattgttctaggaaggcaggagactctcagtgaaaggtacagaggaatataatttggtccagtagcagaaatacctttctaactcctagagctgtccaacaaggaaataggctgataagcaatgtccttttgagccattagtcaacaaaggctggataatcactatgcggaatatgattttagcaggaactcctgcaataagggctgaagtgggggagggcaaggacaggggaaaaggtcacaacatgacccttaatttccctttgcactctacaatttcagactctatgtgtgtgttggacagaatatcaggaaaatggctgccacctttgtttgcattcatgttgtcctctttcaaatcaggcccttggcaaaggtcctgagacacattgtccaaacttgctattgacaatcctacatatattttcctgttcagatgctttggcctgccagaggctcactgggtgtcatacaatagtcttctgtgtcaccagccttgcagatttcttcaagaaactgtttgttgagtaggcgcttactagctggaacaaatccctttgcaaaggtgtaccttccttttcttgaacagaatgaaaaatgtgttgagcaggaaaagaaacttcacagtatttgtgtttttcttttggccctttctgctaggtatcctcactctaattgagcaggctctggaaacctgaaacgcacatcagtcttgtgcctttttctgtttcttccactagcagttgataattatagcttttcgtagatactcagcacattccatgtttttgatgggagcagagcctttgtatggcaaaattgctgatatacttttaactaaatctgtagatgtgttatgtttagaaggcagcggaagaagcctgagctggcagaataattgctgtgttagggcgccactgaagacaaatagtgtgcccaagattgtgaaaatcctttcttataaaaactttttccaacaccagggttccttttgggacagaaataacaatatctgttctttctgagaaaacttggagagaatgtcaatgtgatatctcagggataattcatttttgaaaaaggagaatcctttctactgaatactttttataagggacatttttagctttggaactgcatttctcttccctgtctggatgttagctgtttgtatgagtggtgaggacaaaaagtaaaggattgcatcccacaaaaaccaacctcaatagtttaaggtcacacagatggctttgaggtaagaaaggaaattacatctcctgaaaggcaatgcacaggctattgaataggatgaacttggaggtctcttctagtcctgagattttatgattccatgatcacagaaactactagtgaatgtgatacttcatatctcatccattggctatttcaaatggcaactaaagtgagaagggaaatcatttattcttaaatgcaaattcaaactaacagaaattggatatatttcttggtgttcatgagcattgccagtagtaaaatatatgtttagagataagaaaataaaaacaacttatacttattgaatgcttatgacataccaggtcctatatcaagcattttatatgcatcatagattctattattgtcaacatcttatggaggaggtaactgaggattgtagatattctgaagcagtgtcgtgaagctgacactaaacactcttggctaccatagcatcctgcttctctgtagcagacgctggtgattcatcacaccacatttctttggcactctggatttcagcacaagtgctgtagacagttaattgcctatcgctagtgtcccgcttccttcaagtgcatgtgggaaagaaggagagggaagagaatctgaaagaccgttcagcaggcaggtgcaactcagaattaagagagaataatatactctacctaaggacagccctcaaccagtggaatgatggggatggtttccgggtaaactccgaccctcattgtcccgaaggagaacacttccggggcacatactacaatcgtttcttagagtgtccctaacaggggtgagccccccactcaatacacagtggtaagaaactcattcctgcgttcttctaatacatcttccttccctatctcattgtctatgctcctcatttctgcatcctaggatcagctcccaaataaacttcctgccctcaagtccttgaccaaagtgctgttttggggaggagtcaaagtaagattttttaaagaacacacacgttactgctatgtagttacaggcataatcttactaatggactataatgtccatcataccatggggttgatggtcataaaacctaggcgtatttgggaatatttctgtgacattaaatctctaactatataatagaagctaatggtagtatattgaaatttgttctttggaattcaattattcaataaaataagagaaatctctaccacacattagcatgaccccgttgaagtcttcagaaagcctaatgatttagcatgactatttcaagatcatttttcctaggcttcctcccatcctactcctggaagtgctctgctattaatttcctttgtggtcttagataagtctcagactgcaggtgaaatgattaaattctcatttctcttgaaaaatttcacacgaagtctcttttcatctatttcaatacctgatatttaatttgaatggagtataacaactacattgatatagggaaagttttattgaatgaacaaagccatcacataaatttttctttcatttttttttttgtcagtctctgaaattagtgaataggtagagacatccatcagttggatcattcttaggtaacattttgtttataagaacagggcagtgctggaatgtggatttacccacaattctcacgtgagatttctaccattgtactgctgttttcttcttgtctctgatttttttcaatctctgctcctcaaacatccaggtagctttgatcagtgcttcaagcagagtactggagtaagtaatatatttttctataaccttgtaatgaaagcatgatctcttcttaaggactctgtacttagcgaggcatctatcggtgattgtatactttgtagattttatttgggtggttctaccatcctccatttattacatatgacaaactcagtaagattaggctaagaagaactggttcctagaagctaatgttaccctggacagttaacaaaatttttgtgaaagtactgtagagttagaaaacacaccaaatagtacaattctccacactggatttcttcaatttactgttaagttgtaaaaagtaggcttgtacctgatgaaaacatttggcaaatttgtatgcagtaccagtgaaaaatatgcacaaattggcaaaataaggcaagattctaactgctgtccatgttcaagaactataacagtagtggggtgaatgctaaatctttacaataatatatagattgtacatttgtttttcatggattataagacatttttcatttttcagccacacggtattgattcatcacttccatattcagctatgcctatatatgtccatgtcacaaagttattttcccattaaaaatttactctgtccttgcaataagaaacacaaaagagttagttcaaaggaaaaaataacaatttgcatttggataaaaatggtaaatagatttatttttgactcatcctgtgaatccttttcagattgccttctttattttttattttttgagacagagtctcactctgtcacccaggctgaagtgcagtggcacgatcttggctcactgcaacctctgcctcctgggttcaagcgattctcatgcctccgcctactgagtagctgggaccacaggtgggcgtcaccacacccagctaatttttttgtatttttagtaggtatggggtttcaccatgttggacaggctggtctcaaactcttgacctcaagtgacccacccacctcggcctcccaaagtgctgggattacgggtgtgagccactgcacccggcccagattgccttcttcaggtaagtattttaaacctcttatgagctgtttccttccttcatcccttcgtttcctcctttttcctcccctcctaggactctctttctcttttcatttgcctctattttccttcattcttttcttcctttgttcattccttcctcccttctttcttccatctccctcttcttctttcttccatctccctcttcttctttcttccctctcttccttttttcctccttatttcttgctttccttctttatttcactcatctaaaaaaaacctgtagtatagatctttgaggaaattattttagttttgacattcattgcacagttgtctgtaacccagttagggaattctttcctatttttaaaatgaaaatagctgagagatttgtgaggaaaatttgaaacaatgttgattctgaatgtttttaaaaatttctaatatttatgaaacaactgtatctcagatgagcttcaatttgcaaggcatcattccattttcatttttaattctctgttccaatgcctctgctaagaaataagcattttctcataggaagagattattccttttaactttttttcaattttaatttttattcagcctcttacctttttgctaaaaccaaaagttcaaaagaaaggtgatcaggacactcccaggaattttttagccatgtgagaatatatggtgaaatgattcaagtagatgcaacatggtctactggaaaagcactgagattttgaggagaaaacttagctctgccattagttaattgtcatcaaggtcttcctatgaaaattgtagttcaattttcaaacatttattgtttttctccaaagtgctaggcatatgcttttgtgctggagatgaaagatgaataacatgtaggtgctgtttttgaagaacatcactgaagagagagtgagctaaaacaaataatgatttgtgtgctagaatagagccaggttgtacagaaaggttctattaatagcgctcagtgatccctgcaaaagaagcatttgattctgtccaaagagatgagtacagaaaaagccaaagagaagaaatgatatttgatttgggattttgaaggatgaataggatttaaccagatgaatacattggaggaaagatattctggtaggaacactgtgagtaaacaactgtaggactttgggagggattgtgagtagagtgtgcaagatggaaagtacgttggcattataatgattcatcatcaacaacaccatgtttgcttgcctggttgaatgtccctgagtacaccagctgacatggatgccagaattccagctatgagaatttctcctctatttattttaaacgtaggtacaaatcagttctctttgaaccctgcctgactttgcatcatggtttcttctccttatctacttctttgtgaatgtgataactcaactttggaattgtaactttgtttctggcatcgcatccttcctaacatgctcattccaaaaactactctttcactgcactacttaggcaagaggcccccggccatgagtctcagagttctcctcctcatatcaccaaagtgtcccatgggttccagtggaaggtgagcaataacagtatctcctgcagccacctcacagaactgttgtgaaggatagagatgataacagatggaccatgtattcactttggaggtaaatagacttggatttaaatcctgagtctgactgagtaagccaagtcaagttatttaacttctatggtcctcgatattctcagtttcctatgatggggctaatagtacctacttggtagaattattgtgagaattttcattcaatgaatgtggactgaacacttgctatatgtgggctactattctagggcctggggatgtaaaagagaaacaagtccttgcctccttgaattcagactgtaaataaacaattaactacataatataatatcagaaagagtttggtggctggaagaatagcaaagggtaaggggagagagagagaggaacagagtgagagtagtgatattgcagagggtgttcaaggaaagcatcttacctgcatgaaataaagggataaaccatgtagaaatctggaagaagagtatttcaggcagatggaagagcatatacaaaacctctgttatggactaagttgtatccctctaaaaggcatgtgctgaagccctcacccacagtgtaactgtatttgaaaataaggcctctaaagaagtaattaaggttaaatgaggtcataagggtgggctctgatcccatggactgatgtccttttaagaagaggaagacatcagagctcactcactctgtgcacacacagaggaaaggccatgtgaggagacaggggaaggtggccgtctacacgtcaggaagggaggcctcaccagtaaccacccctgaaggcaccttggtcttggtcttctcacctccagaattgtgaggaaataaattcctgttgtttaagccatccagtctgtggtgttttgttatggcagcccgagctcactaataatacaggctctgaggctgaaatgtcccaggcatgtgactgcagcagagtcagtgatgggaggcagtgctgggaaatgccttggagaagtagccaggatccaggacacctttgccatgatgaggagtcaggacttgatgccaagggagatggctgtctttgaagcatgtgcttcaaggagtaaaatgacatgtgtttttaaaagatcaaactggctgctatgtggggaattgactctgggccagagaccatggtcttgagagcagttaggtagacaacaggagcccctagtggagttggtgagaagtggttgggatacattttggagatgaagctgactgaatttggtaatggattggatgacgaatggaaagaaacgagtcaggatgactcactggttattgggctgagcatccgagtgagtgatggtgtttttgtggagactgccactcttacgtctgtaatgctattctgcagacaccagtgtggctcactctctcccgtcttgcatgtctttcctaaatgtcaccttctgattcagaccttccctgggcagccttttaaaaattgcattgtttctctgtttccctgtcatgcctttcttttctctatagtatttatccccatctaacatattatatattttacttaccaattttattttcttctaaaatgtatatttcatgcatttttatctgttttgttcactgctttttagttcacatgtcttgaacgtggtctggtatacaacaggtgatccatatttcttgaatataaggatggatgaatgaatgaatgaatgggtgaaacctggggaagaggaatcaagaactttgttaaaatgagtactagttggccgggcatggtggctcacatctgtaatcctagcactttgggaagccgaggtgggcagatcaaggtcaggagttcaagacaagcctgaccaacatggaggaacaccgtctctactaaaaatacaaaattagctgggcgtggtggcacacacctgtaatcccagctacttgggaggctgagggatgagaatggcttgaacctgggaggtggaggttgcgatgagccgagattgtgccattgcactccagcctgggcaacaggggagaaactccatcacaaaaaaaaaaaaaaaatactggtcaattggaagtatctggaaggtaattgctataccattaaatgagatatatataacaattattattacaagtattcttcctctttttttttttttttttttttttttggagacggagtctcgctctgtcacccaggctagagtgcagtcttgcaatctcggctcactgcaagctccgcctcctgggttcacgccattctcctgcctcagcctcccgagtagctgggactaccggcacccgccaccacgcccggctaattttttgtatttttagtagagacagggtttcaccatgttaagtattcttcctcttctaagtgtgctgcacccacctcttagtagactttggttgggattatctgagagtagtcttttttagttctgtggctgtgtgagcacatggttgggagaatgtgaggaggatgtggccatgaccaactttatccttttgtagccactcactccccagcgtcacacaaatggatgcttacgcagatttcctatatcctccataggctcctatctttgtgctgagtattaattcccatctgtgttcaaggacggtaatcaggcaggggcagtaatcaaaatgatgtgtacagcaaaatcaaagctttcgcatcataatcaaaaccatgcagtaaattataggaatacgtgttctggtttaatcaatgactgatcttgcttggatgcttgatacagagaaaatcaaagatttggtttcaaattagccaaggggaacatattatgaatgatctcatataacttagcatgctatcacagtgattattttttaaataataagattttgctgtaggtctcaccacactactattttagcatacaacgactaagaaaaattctttagtatttgtccttacatagtgtcttgaagaatgacctgccctccaaaagcttgttacaggagagatgatataggcatgagcaaaaaatggtgaatgtgcttgtacccagcagtgttaagtaaattccgatctttgctgtgaattgcgagtgaaaagtttggggtgagtattttatttttcattgagaagtgaaataattgttagtttgtttagtagcactggtttttgggaattttttttcttttttgtctttacacattgcagagtagcagtaaagaaataggttggtcttttaaagggtgtatttcctgcttttaataaacacaagttttatgagaaaaataaataaatttcaatataaaattaagatgtacagaatatagatttagcacatataaaaaaggaaacaaaaatcattttaccttcactttagcctgggctgatttaacaaaacaccataaactgggtagatttttaacatcagaaattaatttctcatagttctagaggctgagaagtccaagatcaaggtgctggcagatttggtgtctggtgagagcccactacctcacagatagccttcttctcactgtaactcacatgggagaagtggccagagagctccctgggacctcttttataagggcactaatgccattcaggagggagggcatcaccctcaggacctcatgacttccccaaggctccatgtctgaacatcatcaccttgggggttaggatttcaacatatgaattttggattgggacataaagagtctactgcaaatttcttcatgtcagtcacattttaaccaaaatcatcttacatggacttctctagaggtagttatattttttaaccaactgcacttttatatgataacatatttttatatgccacctgcaaaagggctacctaatgaggccacctattttttgtaagtgtaagagactcagctggaagcaagttcaagtgtgaagcactgtcccctctctacctgggacatggtgcatacaaatgggagtaacatgagctttgcaggggtcatcttggcctcctgtcccacctccaccacttaccagtcatcattcattattgttattccatgaacaatgccacccacaaacccagagtgactctcagttcattgcttgtcttcacccagcgtaatgccagttgtgtgtccttaacatctttctcatctccttattttgtcctcacttctctccccactgccaatgtttaggcctgcagcaacgatttcctaaattgcccaccttccatccagcttccatcacactgctagagtaacacttcagaaaatccaagttcaatcctattaaaatcttattttaatcagtcgtctatttaattatttttattattgcccattactaggatagagaattccaagtttgtcaagtaatgaactgcatgatattcctggtctctttattcaaagtcatctcctacttatacccctaatgtgtgcgcgcacacacacacacacacacacacacacacacacgtacacaccatcttgccttccaggcaccctcagccacctttactactcctggcatgctgtctcctgcacaagtctcattgcctttaccctctgtggaatttccctctctgtgctcttaccagatcactttataaagttatttttaaatatgcttgtgaaaataaatgaagatcacatgaacaagaacagaggtgatttatttagagtttgcaagagaatcaaccactatcagttgcatttggcacagacttaaaggaacacagaaagataggaaacctttagagtgaaacaaagagcaggttccaggtacgctgtggcatgaggaagctggagttgagctaactagatgtgaacatctgatgtggttggtttgggaagcagatcttgcttcctccggttgattctgagttgaaaggagggagccaagaatagggaagctggcagtcattgactgtatcgtgactgttggggccagttgctgtagaggttgtggtttggcttccagctggttgctgcagaggtggtgctcagaattctgttgtcatatattgtctggccattgtccgtttgtatatttcatctctcatgatcaatcaatattttttgaatgagtacatgaatatttcatctcagtaagtgatcattccctcctcatccatcttaatcataaaattctaatgtcctaggttctttatctttcaacaaattatgtttccctttcttaatgggtagaaaaaggaagcttccccataggcctaaatgtgctgatttcaagagaaagcatacttctttgcaacaagaaattgcccaggccttcactcttaaccactatgctacatcaacgtccttagatgaaacagagacttgggggcatatatttcccaatttttcaaaatccatttttatcgcatattcaatttggcctgcttaccttatttacattacctgtctgggatgaaagacatttgaggttgtcattctggactcttaagtaagttcttcctttaaagtaaagaagctgaccttccaagctaatttatcccacttaacaagagtaataataacacaccacccactccagaaaggaaatcatgcagatgaatgaaataatgtttgtacagagcttgacactccataaaatactctaataacatggtgtctacactttgaaatgttcaaatcctatttcaatagaattaaaagccatgaagaataaaatgtgaattgcttgtcagacttttacatagaggtgcagggtgatactgatgccattagacaatttaaaagctgggttttagcaaagtttctgaggaatctgattggtttgtgggggagaaagtgatggtggtacttattcatatccatttttgtagaaaaacaataggttataacatgaaccgagaaacacttacgcagctaaatttacagaaatctgtctactcatctccgaggaaaagttttggctaagcaagttaattttgtcgttagacatttgcatagtaattgtattgagtctgaatgtgcatctgcatggaaagcatgttttttcaatcctgttctttggacatggattaatatagatcctggcgagtccttaaataataaattattgaagttgaatgcttaattactttacatttagatcttttataaccagatgcttgaacccctagtctgccatgtattgctgctgcctttattggtgttaccaggtaatagtcacctgagtttttcacatggtcttggtttgagggtagtctactaaagaatgcccacatatagtgtttcaaatattattaaagagtgataattaaatgtgcctgatgtataaaaagcatgtgaggtcatttaaactaacacttttattgtgattgttgtgaaggttatgaaaaacttgatcatgtatattatctaaagggattgttacaaacctcaagtgacttcaggtcattgaaaccattgcatgtggtgaccagctacagaggccatgacatttttcccttgcctattgtatccaaggttattttgcaaatcaccgctttgcatggtacaaccttcggagtttctagaaattgcctggagtgataaaccagagtatattcaacaataggatttcctagaattagtgggagaggtgtaattaagttactgtgtaatatatttcccccaaatgataaatatcaatatgtgaacactgaatatgtgctcctatgaagccaccttaagtggcagtttttagctcagaaattgtgaaccaatgttttgtccacctgaaccagtttgggtggatggaaaagacttaagggcagatttcagaacttgtttttctttgttaattcaaaaatgattctactaaactctagatgagatcaagtggtgatagagatatcagctgagtgagttctgttttctggaactttcttgaatctttattagtaattcatagcatttttctagatttcatggctgcagtttcatattgacatcatccagtatcactctaaagggactctaaaactacccttcctggcattcatctaagagctgggaagccatccgcttatacctggcttagaatatcatttttagagacatgaccacaagcctgctgacattcaagagcatggcttaagtgcatcccactcagagctttgtgaattcttcttgtaaattatgatgcctattcaagatttagtgggaatactccctcttctcaagcatttatcaaaacacaaggtgaatgcattatccacattaactgctgttcaaaaattctgtccaaaagttttgtttcaatataggcaaagtttctgtgtgatgcctggcatatggccaaccatataggatggccatgatctttattactgatttcttagtgtttattttgaatgtaaagttctttatgtttttcctaaaagttcctcactgtttccctcactcacccactagcccacatattcacatattttacttggttgtgactatttgaagaaagcccttaaagcttttttctaaagccccccatttaagattttcaagtacataggaaccactggggactcttactaccattctgattctgtaggctggggcctgagggtcttcattgctaactagctcctaggtgataggaacagtgctgagagcacactttgagtggcaagtctccaaagcagtgctgtctaatagaactttctgtgatgatggaaatgcttcatatctgtgccatccaaatgagtggccacttgcccgatgtggttaatgagtatttgaaatgtggccagtgcaactcaggaactaaaatttaattttatttagtttaattaatctaaatttaaatagatacctaccttatttgactatgctaggggacttaattaaagtctttatagctccttggctttccccagtcttgagaaaaagaatctgaaagtcgagggctctttcttatctccaattttccagaatcttgcatagggccaagaatattatgtatgcatagtaaatgacattcctattaagaggtctagtctgcagttttgggggcagactcatagaactgtcaaataataaaaagatttgactttgaagctataagacatggtgggtaggtggctcagcctctaccacttacaggataatttctgacaagtcacttaatccctctaagcatcaatttcctcatctcaaaatagcaatcatgattatggtaatgtaatacctatctcacagagttgctgtgttatgcacataaaattcctggcaaattatttttttcaagtgatacttgctctgcaaatgctagtttttgtggttatttcagcatgaatttcttttttcccctaattagttatatttcagtaaaacaatagaggaaggtaccctgtgtggacatagttgcaatccaattgagaggttaaataataacacaaaactacatgcagttttgtatcatttctcatgtggagaaagtagtttcgacggtcaaggaggagggcttcagcatgttactttgattctttgcattttatattattttatgtggaagcaaacaatatttttggcctgggattttgtgttgtttgatttaattccctcataaaaatgtgtcataaatgctttgctaattgtgattgaaatttcataactctatctcatcttaaaaatatcccattccaatttgctgaatacataatttccccttgtttaaagttatataatggacatattttctctttgtttttcttgagtatatttgctttgaaatagcttttttgtttttcataccctctgtttatatatatgtatatatgtaaatatatgtgtatatatataaacgtatatatgtatttacacacacacatatgtatacacacatatattaatcaaaagcattgcctacttcaagaaaataagaaaaatcacaaggggtaacatttcgcaagtgtgcaaagcactattctaaacaccttacatatataaacacgttgagttgtcactgaggctgagtaaacctttaagctcttttactgtctgctgtggtgttgagttctgaaaatattgatagtcctcttatcactggtaatgacatgacgtgccatccaatgacctttgtacaatcatgatttatgtataggttgaactaggggcatcgccatttaagaacgattaagacaaatcaaggcatttctgaaagagaacagattgattttgtttcttaaagtatttatagcttgtaaggcagctgtctgcttttgtatattcttaaacaagcatcatagaccttattcaataatttaagtgttttctttagaactgttttgcagcaaaccgaacttcccatttgcattgatcagtgttttcaccttcattctagattacattttaaagtaaaccaaccaatttggataaatgtaaacgcaatcacttgttaacaatcttctgagactgaatcggtgctgggtatttctgagtttctatggaaggaaaatagttcaaagttcagattggctgtctcaccacctaagctccatgccttgccccttgctttcctccacaataaggcttagacgcaaaacacttcgttttcctgatcaccactcaggcatgagagaccaggtgatctatggctggccaataggccaacaacaagtagggagaacctcctttcatgagtagaaaggcaaagcattgtgaagggagcacctttctatattattccaacctcgaataaatgagaatttatttatttattttattccagtttgttcatttatttcttatacgctctaagaggcaactcagtatgttgattatttttttcagattcatgcccattcatcttcttaaagtagagtttctacagatgctccaggatcagtctgacctagtacagagcagtgtgtgtgtgtgtgtgtgtgtgtgtgtgtgtgtgtctgtgtatgtgtgtgtgctcctgcatgcttttaattatatattgaagatatgctaaaatatttataatgcctctcaaagattcaaagaataataataaaataagcagctttccctaccttagagaccttctgtgtacccttcccttatcccttcattttcttccctaccaacataaccactgatctgaattttgcatttacttttctcattcttctcttacagtcatactacataccaggcagctctaaagatatattgtttaattttacatgttttggacttctttaaaaaaagaatcatactgaacaaaaatggaatcatattgcatgtattcttatgaaacttcatttttcatccaataatgctacttgaaatgtatttatgttgatgtagttactacagccatttttcactgctctatatttgtctcacttttgccaggtttaatttttttctattttatcctttgaactagcttgaaattatatacttcactcttttttctaatctcttggttactccagaaattttggcttgtatacgtaactttaatcaaaatctttatgattctcttgaatgataaaatatgttcagcattttagcttcagctatttagtctggtatttaattacaccttcctaaaccacacacattagacatttttactacaatcaatgcttatagaaattcactcacatatttatcagcattttttttatttacctctccttcatgcatctctgactttgcatttgggattattttccttctgactgtagttggttctgtaggaaatcctcccgggagtattgttaaatattttccatttgtttgaatgaaaaatggccttttgaaatcttttgtattaaaagttggatgcactgggttttcagttcccggttgacagttgtttcttcttggcacattggcagcagtttctcctatagtctaatattcactgttgctgttgacaagtcatggcaattgttattcctctgaagtaatctcttcctctggttgcttttaatattttcatgttgtattgggtgttctgaaatttcactaagtctccaggtatatgtctttctaagtttcctcctcaggatttgttgtgcttcctaaatctgaggtttgaggtaatcagttctctagcatttatagcccattgctactttgcctccctcccattcattctgttttccttttctcaatagacttttccactctgtcgtgccctccaacaactttcttatgattccaacctagctgtctcactgtgctgccttctaaatcactttttcataactatcttctaggtcaataatttttccttcagctgtgtctaatctgctgataaaacatctgtaaggaacatgactgtgctgcacccaagcaggcataggccaaggtaaacaacctggatgactcagcaggtttgtggtacaagtgcatagtcccatgtcttatataatcatagctgtgtagagataacatagaaaagttcaccgccatagccataacatagagaagctcaccacctagctctcagccactattgtttgtgtaatgtataaaagtaacactgaccctgtgaggcagctgctgaataaagccatgtctcatctacctgctgtttctcaagtgttcttccagctccctgccccacatccacccactcccctcagccctcagctggggttggaacttgaccccaagcatgacaacatccattggtttttaattttaattaccatatttttaattcctagatattctttttgctttattttaaaattgatttggtcattttttaatagttacttcttccttaatcatattatcatcttcttatttatttcctgaaatgtgttagacattcttagataattcctatatctattagaattatgggttgaagttgtttgttatttgtgctcttcttattcatgttgacttgttattttatatattatatattttcatggaactttcttttaagtgttgtctgagacctgggttcacgtcaaggatgatttttgtttgcttcaagtagctgtccacagaggtagaggtgggaaatcaaccagtggccaataaattcattccccaactccctacaaaagtagtatgatgcaagccataaactcaaataccgaccaggttgtgggtatgaaatctctttggagattttttttttccttcacttagtgctcaattcatcaggcaatttcccttcttgttttctgaaagaatttattgccagttacagcttatgctgctgttccaattgtataagggatctctagtgagactccccacattggaaagtccttagactttttctctgattgctccaactcacacatttgaaatcatacaaatggaagctcatggttgccaagactcagcagatatcttcagggtgaaacctggagtcagtgttaatgtctcttcagagtctttagtttgttttcatccttttccagcagaagagccctacaaaagaagacatttatgcagccaaaaaacacatgaaaaaatgctcaccatcactggccatcagagaaatgcaaatcaaaaccacaatgagataccatctcacaccagttagaatggcaatcattaaaaagtcaggaaacaacaggtgctggagaggatgtggagaaacaggaacacttttacactgttggtgggactgtaaactagttcaaccgttgtggaagtcagtgtggcgattcctcagggatctagaactagaaataccatttgacccagccatcccattactgggtatatacccaaaggactataaatcatgctgctataaagacacatgcacacgtatgtttattgcggcattattcacaatagcaaagacttggaaccaacccaaatgtccaacaatgatagactggattaagaaaatgtggcacatatacaccatggaatactatgcagccataaaaaatgatgagttcatgtcctttgtggggacatggatgcaattggaaatcatcattctcagtaaactatcacaagaacaaaaaaccaaacaccacatattctcgctcataggtgggaattgaacaatgagaacacatggacacaggaaggggaatatcacactctggggactgttgtggggtgggggaggggggagggatagcattgggagatatacctaatgctagatgacgagttagtgggtgcagcgcaccagcatggcacatgtatacatatgtaactaacctgcacattgtgcacatgtaccctaaaacttaaagtgtaataataattaaaaaaaaacaaaagagctgtacagggaatctaggctggcatagtgtgagaaacaaaacacacatggcagctctttttgccatccacaacaaaatactaacaattgagcctataatcagctaaatccaaaggcaacataatgttcttccccatcttttacttgtgcagttgtgttttggatccagattaaagaccttaaatttagtactattaagtttattgtttgtaggtttgactgagctccgtaaaattttttggatcttaattctatcacttaacagtcacaattttccccaatttcatgtcatgcatacatttggccatcacaacttgaatgtttttactacactgttgtaaaaatgttgacccagatcagattaaagcctcaatatcccctctaggtagagactcgtgtatgatgtggcattgactaggtctgctgttaggaatactttctctttcttttcttttgttttatttttgagatctccctctgtcaccaaggctggaatgcagtggtgcaatctcagctcactgtaacttctgcctccttgattcaagcgattctcatgactcagcctcccaagtagctgggattataggcatgtgccaccatgcccaactaattttttgtatttttagtagagatggggtttcactatgttggccaggctggtctcaaactcctggcctcaagtgatctgcctgtcttggcctcacaaagtgctgggattacaggcatgagccaccatgcctgtccatatttctttatcttcaagaacatattttgccaaatgccttcctgaagtcaacacacattgtatttatgatttttttagccagagaagaattaaatcagttaacatgaatttgacttataaatccacctgtgtgttaatcaaagggctccatggatagccacacccagtcatcatttatcatctccatttattcctcactggggtcatttgaagattctgactcagaattacatccttgataccttgctaacagtcaagttaagctattatggaattgtgcctattttcatgaatatttgggcagcctcttttcctaaagcttataataaaggcctctatgaactaccatgaactccatggacagtaggtatacagtgttatatttgagttccttcccttttcaccagatgtccaggtaatctgtactttatttctataatgacatagcatccatccttttctccttttatcttttgagcattttccagggtgctttcatcatcttggttttggatttttatcagaacatgtgtccttgaacttgcacacaagaaagactttcagtgattgacacatccaaggcttcttatttagttgttcttcaactcaaccacattgtctaatagaaaccagccaggctctgctgtctgcaccattaggatgattatgaaaagaatttaactagcattttcctatttatctttcaaatatataagcttctacttagcaatatgaaataacaaaccactgctacaggaaaaatgtggataaatctcacagagattgtgtggaacaaataaaacaaatgaagtcatgtgcaaaagactacttactctgttgttctgtttataggaaattcaagaacaagcaaaactaataaatggtcctgtaagtcagaatagagttttcccctgggactgggaaatattgactggaagaagcgtgagggagccttatagaggctctatatgttctatattttgatctaggtagtagttataagtctgtttacatatataaatattcataaagttgtacatttaatacgtgtgcattttactatatgtatgttataccttaataaagaagaaaaactcatttaggttacaagtgagaatcagttttagtgcagtacttatatgagtatggactctggagtcttggatatataatcagttgattacaatcaacatctgaatgattttggaaactaagtttcctcatctgtaaaatggatgattttctgtgataactgtacatttttactttttgtataaggcataatggagtgatgtgtgtaagtcacttaccatcatacctgccacaatacatgcaagttttagtataatatcgtcctgattcaaaacatttcctgctttttaaaacatcctgctgtttagacagatgactgacattattcaatacatcaaatggtatgttttcattagttatctatttgtgacttgcttagtaattataatggcaactgccatttatgtaactctttatgtttaaaagctaatttatatacattatctaatttaattattcacaacagtgctataaaaatgatattaattttatcctcatcttgccaacctagagcctgagatgcagagacctgaagtaacttacccaaatgacatagtcaggaaatattagagagagtcataactcagtcatttatctttccctcttcaaacggaagggtacattagagtcacctacagagctagttacaagttccaccccccgtagtgtctgattcagcaggtttgaggtgggtcctgagattgctgcatttcccaggcgatgctgacactaccgtcctatggaccacactttgagtagcaaagctttgcagatgaagaaagcgtaagcatcagacctgagttctgccttcaaagagcttgcatttcttttttcaggaaacaggactgaagtatgaaataatagaagcctccctaaggtggtttatatcctgagaacaccctctttgctggaaagaaagtttcatagtagaagagaacttaagaatactcagattatatataggagaacaaagtatgcttagatacgctaattttaatggtgttcaatgacttatatgccaaaatgttaaaatggtgggaggcccctaaattaatatcctaattcaagtatcctagtcgtgttattctcacaaattgtcatttcattatgtcaagtaatattttagggtgttttaaccatcgttatttaggtctttgattgatgtgaaaattagtctcagtgctgtaaccacaggtttttgtcagtgtaaccctactgagttccagcttcttttttaaaaaaaagtacatatgtgtacccacaaccattgttactaattgaaatacttgaagaaaagagagaaaacagtgaccaaaattcttataaaaatcaaaagctttccattttttccagctttgctttgtttcacagcagccatttatcagagttttaacaagtaacaagtaaccagtcacctattttttaagtgacagcattattaagatataattcacacaccatacaattcactcatataaagtgtacaattctgtaggtttcagcgtattcgtagagttatgcaaccatcactacaatgtaattttagaacattttgttacttccaaaagaaaccctgtccccattaatagtcattcctcatttctcaattcactctgccctttgcaaccgctaatttactttctgtctccatggatttgtctcttccagacatttcatagaaatggaatcacaaaatatgtggtcttttgtgaccagcttctttcatatagcctagcgtttttgagatccatccgtgtaaaatggatcagttttttattccattttatggtcaaataatattcaattgaatgaatatgccacattttatctacccattcatcagttgatggacatttcagccacttccacactttggctgtatgagtaagaacacatttatgtacaagcttttgtgaggacatatgttttcatgtatctttggtatatacccaggagtagaattcctgggacatatggaaactatgtttaaaccataaggaactgacagttttcctaaagagttgaatcattttacaattccactagcagtgtatgatgattccacgttctccacattctcaccagctcttgctaatatttatctttttgtttacagtagtgggtgtgaaatggtatcttgttgtggttttgatgtgcatttccctaatcctagtgatgctgagcttcttgcatgtgcatttgcttactttgttttctttttccatcctttgagacaaggtctcactcttagtccaggctggagtgcagtggtgcgatcacagctcactgcagccttgacttcccaagatcaagtgatcctcccacctcagcctcccaagtagctgggactacaaagcacaaactctttagttttttagaaatggggtctcgccatattgcccagactggtcattcatttatctcttttggagaaatgtgtattcagattatttgcccattttttaatttttttttctttttaaaatttaattgtaaaatttgaataacttttttgtgctcttctttgttttggtcttgttttgtttgatttggtcttgttttgttccttaaccttttggtgactagtgagtagctattggtagaaagtgggtaattactaaacaaattgcaatgagaaaaaaaagaattaaatagtgtggaacacttgcaaatatgataactaagttttaccaattatgaacaggttaatatttggtttactgtttggaaaataataatgtacaatttacacattggttctaatacagtatttaatctgtatctttgtgtcatatttaataccaccattttccaaattgttccatggaatgtaataggttttatatcaaaaaggggtctgtggcttaataagtctggagaaccataggctcaataaacgggatggagtgttttaactcaagggcttccttgaacctttaatatgtaaatagacattgtaagtgttcaaagcaaggactgtacatgaaaataaaaccctttactttccctaatcatttcttttgggacttgtgttctgtggaacacactcggggaagcattgctttaaggatgttaatttttcttaaagaaagtatattgccctggagagctcagattgtgacaactggacaggtacaaagactggatgaaacagcagcaattgttaagttacgtgttacaaactcagaattaatatgggaaggatcctgacattttatgaaattaaaactaatattaattgaacagaaatagaaaaaaacctgggaagacttgagacagtttgtgattcctctcagctagctggcatgtttattttgtattacagtgcataattgaccccctgctaggtgaattggattttgcagactcgccttgttatgtatttcaaagagctctaaatttaatacatgctgctcctcagggttcaagctttgaatcaccctccttttcctgtgttttagctgggtaagtttctctcttttcaagaacagcaactttttcaatgcagacagtttaattataaagatcttctcatttcggtaatgttttagtgaatctcatatttcctcataaatttagggagaatgcagctatttctaaaaataggaattaatagttgagttgttactggcttttttattgtcctttccagaattacaaaaaaaatagtctttggcagttcacattgcttcaggttgaaagtatgcaaaatttttaaactattccatattcgtaataagtgaaaaaataattatttttgatttctcccctaaggtactagcaatgtgtccattaggaaatttagctcttatttttggtgaagtagcagaatttttgtttcaaggcaaattcagcatagatacttgattgtaaagatattattgtttgcaaatctttgtggagttttttgggggccaaattgaagcattaactcaaaagaatggcccttttcttttattgttatgttcttttcattttatttatttgctttcatacattttctaattaattttatgtttttaccaataccagccccatcactggggttctggtgaccacttaattttactgtgaagtagaagccagatgatggataagtcaagccccaatataataaagccaccttaactagttaaactgatattatagagcttagctctgactccagatatacatatataccattactttatagaacaactctctctggaatagccgtgttctctttaagccaggtatgatggtgcatgcctgtagtccagctactggggaggctgaggtgggaggattacttgagcctaggagttcaaggccaacctgggcaacactgcaaaactttgtctcaaaaaaaaaaaagttatcttcgtcattgagatgttgcattgatcacccaagtatggtgaagaattgaagagtagccaattagagtgctcgattatgaaaatatgatgcaagatagggaccaggaaggtcaccacagttcttcctggggctagttgctatgaaagataaacccccacatctcagtagcttaacactattgaagtttacattgttgtttacaaaatgctctttctggtggactgtttcccttcaagccatgattcacatggccggcattcttccatcttgtaaacccatcatctacaaacagagacatccaacttaccctgctaggctgcatcaagccagaaggagaaagagtatggacggtcaccagtggaaggtttctgtgaatgtgactctagctctaactctgtgagctagaagtcagtcatatcaccaaacctcatcccaagggacactggggcatgtaatccaaccacatatgctcaagaagatgaaatggattttggtgaacatgcagtgatcttgacatacactgctgaatatttgcttttttatatttacagtgttgaaattaatctgactaatgaattggagttagttatctccaaaggaaaaaaaaattacacatgcacgcacacattaattatacattagtcttaggctaataattaatatatccacatgttaagtaatttctttaataagttctcttcaaattagttcaaagatgtctttggcattcctagaaggcacattttattgatctgttctcaatttacaaaacaaataactgactctttatatctcctgaatctcctttgaacattaaactgagtagcaaagcatcacacatagcaagaaaattgattttgacaatccagccttgttagttatcatttcaacaggtgccattagtatcaagaccgaggtgcctgccacagctctagtgcaataatgtgaagtaaatatccatccaagcaccctggcctcttctccaaaatagaaaatgacatcatgtaattggttttgtctgaactgctcagtgagtgaaaatgtgtttcagaagagttaaggcatgatgtcattattcctgaagtggattcttgcaaaggctgggcactcagcagcctgagtcttaaaaccagcagcagtacaaaaacctgatgcagaaccttaaccccatttatataatatggtgaattttttctcaaatgggaatatggtgcattatctttaaaaacaagaagtgatcacatgctccagaacaccactgatgcctctaagaaatcttattgaattaagacagttaattaattgtctgcaatagtcttgactcttgcctgtctctcacttgagcatgtgttgtaaattaggcaggaatatcattagggcatccagttcgttcccatgccccagtggcaaagaggggcaggacatgaagatgattttatttatttaacaaatactgatcacctgctatgtgccttgtaatgatcttagtgctgggtatatagccatgaataaaatgagattcctctttttatacataataagcaaataaaaatacaacccaatggcaggtagagtttcatgctaggaagaaagataaagcaaaatgacatgctagagggtgatgcgggagtggcatggactggaagatgggctgtcagagtatgacatttgagcagaggctgaaatgctctgagggagaaaatcataaatcatgtggatatttgttggggaaatgattataggtgtagggaacagcaggggcaaagtccttggatcggagtgtgcttggcaagtttaaagatgagcaaacatgaatgaggggtagagtggcagggattatggtggaggagaggcagaaggagcagaacatgcaacatgctggatgctgctgtaggccctcataagggactgactattgagccataaagccactcgatttcaggcttggcattcatgctctagcaccagaagtgtaatgctgggtggtctatgggctctgcatttaggctggggactaagatgtgacatttctggaccttggatgattgtcaaaggatgggaggttggttctgggttcagagaatggggaagtacattgcccattaagaattttaagagatctaagtgtgaccacaattgatgattttattatcttcacttcagtgataaaattcttcaccctcctcattccataatattctgctgctttcacctgaagttcgccaggtatgattaaacattgagtaattcagaccaaagcttccagatatctagtaacaatatacactagtcaaaaaacaagatcacacacacagacacacacacacacacacacacagacacacacacacactctttagtatatttggcaaggagaaatcattgagtgcatgaatttataatgggattgtatattttcaatcaaagatcttacatgaaaaatgttcaatcattaagataagggagacatttatgttatgtggtacccaagatatgccagtaaggttttttaaaatacactttattcatttgttcaaaagccattttgggtggtggaggcttactctgtgctactgaagacataatgaagatcaggagataccctggcagccgagagcagtggtgcatgcctgtaatcccagctactcaggaggttgaggtggcaggattgcttgagcctgtgggttggagaccaacctgggcaacacagcaagaccctgtctcaaaaaaataagtgggaaaaaaagacagagatgtccttgcaacaaaccagaaagtgaggtataactattctaattttacaaacaaggtaactgaggcacagaggagttcagcctgtgttcggagtcacacagctggtaacatgaagttgaaacacaaatgtaacttttttctacaccttgtctttttaaaaccaacaacatctttcagacacttgcacactttttttcagataattggtgtatgtaaaggatttcacttcacatggactatttggtagatatataacatcttagatatagccaatatcttgtataggaacaatgtttgtatgaagtaaagaaaaacaataggataatcaatgcaaggtagaaagtgatagcacacttctgtgattaatactaggataactggtaaagagtatatgctattttgtattactatttccataacttccaatcatgcacatggctgcttctctacaactctacaaagacagtatctaacacactgtcatacaccactgcttcctatcttgttaaaatgccaattctgacgcaggtctggtgtgggacctgagattctgcatttctaacagactccagggatgcagatgtcattgctctgtgctcttaaatgtggagtttaaggctattacagtcatttccggcaccaaccaaaacactgtgtcttggcccccacggctactggtggtcacttttgcaagaatgtttcctgggagacctagtagagcagcttacaggagttcacaaagacacaaaatgatggtaggaaggaataaagaggagaagtaaaagtgttgcaatggattctgtacctcaatcctgaagaaaccacagatcagtcacttccttcttgttcaagtgtgtcaagtgtgtcaagtgtgtcagcctgatttggcacagctgacttgatgaagcatgatctcacacagcaaagctgttgatcaccttgaagaatatgtactttgctccttggtgtaacctaaattttacctcgctaaaacaaaacaaaaagaatctaatattctactcatattattcattctggctggatgctaaagttaatttccttaagtgcttcagatactatattaaaactatccttttatcaaatattttaatataaagcttttgaaaacatgcaagagaatttcttcattagagccttctccaattttaatgagcacacaaatcaccttaaaatcttattaaaaatataaattttgactcagtgagtctgggatagggattgaaattttccttttcttaaaagatcttagagaaggtggatacagcatccttggagcactctgaatagacgggccttggaatatcttatcttcacttgtattaggatggcttttttgtgtgtgtgatgttcaaaatgatgaggaagctatatgtttacatatcaccagaagcttaaaatgatggaaaggaggctcccaccccatcatataggccattgatcaaagattctgcagtcacactatttccttaccatgatggattattcaaacaccagctgtaggaaaaggatttttttcaggaaactgatggtccattgtagtttttctgaaatcaggctgtacttgaggattactcagcgggttccaaagagtacagacatttaagatccaccccagaccaactaaatcagaatctctgggcatgaatctaatgagtagtctctagaccagcagcacctgcaagcttatgagccatacagaatcgcaggcccctccagatctactgaagtacagcttgaaaagatccccaagcaattccaacgcatgttcaattttgagagatgttgctaactgggaggcaaagctgtagagttgccgcagcaacttaattgtaaggtattaaaagtctcctttcctatctaatcgtttggatgtctgccaggtattaggaccaaaggaagacgggcagacataagaacccatccaatggtggttacattgattatatccttcctgaggcatctgaaatagtataaaataataaggagagaacaccaaaaatgtatcaacttccatgtaactagtgtgtattagcccatttttgctttgttgtaaaagaatatctgaaatttagaaatttagtaatttagaaagaaaagaggtttatttagttcgtggttctgcaggctgtacaagcttggcaccagcatctggtgaagcctcaggaagctttcactcatggcagaaggcgaatagggagcaggtgtgtcacatagcaagagaggaagcaaaggagtggggaggatgtgccaggctcatttaaagaaccagctctcgcatgaactaattgtgcaagaactcactcatcaccagggcgatggcgccaagacagtcatgaaagatttgcacccataatccaagcagctcccactaggccccatctccaatactgggaataacatttcggcttaacgtttggatgggacacacatccaaaccacatcttagtgctttacatagactgttccatctatctctcctctttgtcatgggttttggttgactttctcccagaaagtcctccctgcttgtttctggctttaaatctattgagtaaaatttatctgaaggaaatttaatcaataattcaaaacaggaatagattattcatagggagagctgtgctcacagttttgttaatttgcagtggtagcattctttatcactggctgaaactcaagtaaaggagtgaaagatcaagtatttgttgagaaactattttgtgcctagcatcatgctaaggattatggtgacaaccgcaaaaggttagtttcatggcacttgttggagatgcatgtatttaacttgcaaatagtatacacaactcgtgtgttattaagttatgaaatattgaaaaagcataacatgggagtttaataatggaacacagacagactgagcagaaaaaaaaaattagtgaagggaggtgtcattttgaatttaggcttcacagagccaacagaacttgagtagatttaagatgtggacattccattgagagaaaacagcttcaacaaaagcaaaatatataaatatacatatataaataacacacagatgacaggaaacaaataataatgagagcttacccttaaacatgcagcactattttatgttttgcatttttaattttgggcatagaatttcatgtatgttggggaaactgtagaaattcttcttattctaattaaggaaggtagctttgaaaacaagcatattttaaatagttaaaattttcattattttttcctcaaaattatagattgtggtgcttttttgtaatttttgctaacttcaaaatgtaaagttaaaggttttatgaaatatcaattctgaaaaaaattttctgctactaatgatctaaaaactgctatgttaagcaggctcttttcatagattaaaaatgctcaaaattactttgatgtaaacttcattcattatacatgtaaaaagcttggtttacatggcttataagtcagttttacagtctggctgttaagcctaattctttagataattactatgtgaaattttcgttgtcattaattcttcattgtggcaaactggcatgagtattctctattatggagtaataatattaataagaagtgcacatattcaaaataatgtagaattatatgcactataatttacatatttgtttaatgtcttattttttattatcaactttgcttgtttatttgttttatgtcacctgctgtagaatgctaattggtaacaaattatagcattatagaataggtgcaagccatcaaagtgtacatttttatgtaaatattttatttttattatagaatgagtaacctaaagataaatgcagtgcattctcagcaataagataatgctgaaatacatttcagaagatacaatatttttaaacctgacaggaaattataaaacattagcttacatgaaataagtttcattctatatgagctttaatactgcaagatctatgtctattaactgacaatggaaagttttgtgaggaaaatggttgtatgctatatctttgcttccactaacaggaaacattacagagtcacaattcttaatagaccgcaggctcctttacaacttagccatctatattactcacttttatgtccctagcattggtgatagatggtgttatttattcacaattcttttgctttccatctttgccatgagtgtaagtggagttgacaatctactgcattgacttggccctgtgacttgctttagctagtcaaatgttagtggatgtaatgactttacatgtgcttgtgtggtatgactccttctcttgcatttctgccctttactatgagaaaaatatcttttaggtagttgacgatttcgaaatgaaaaggatatgaagatcagaacccaacctgtagcataacacaaatctatatgcacaaagcacgttccatgcagtcatgtcttagttctgggatttctaggtatgggatttccttgagctgagcactacatgtaatagtgatggtgaactatctaggtatcggtttctaaaggttttctcagtagtgggacagtagctgagaaataaaggagaaattggctaggccaggagacttctccatctctagggtcgccaggtaatagttcagattacttcagagatttaaaggtgcagcattagaacatggttttccaggttagcagggtcaggcagttaccagaagattctgcaagcatgacttggtgcctgagtgggtggcgagccaggggtccctgtccaatccccaagctgaacagagaataaaatccggattatgattaagctcatatccaccaccacaaaatggagagaaaaacaacagatttggttaacacccagtgttcaaggaatgagaaaagggataggaagcaaacttgaagcattgaaaaaatatgtcaggtcctgaaactggggggaggagaagtgggaaggagatgttctgaagagcgtcactgagaaaggcatatttatacctgaataagttctctccaatctgcctgcaatttttagctagtttgcctagtgtagccagattacagcctttgggtgtgttctgtgtcaccaatgaggagggctctgtaactgttgatgattgccatagaagggtgggtttcctgtcaagtcctccaggtactatccagatgctcccccaggatctgacagaggctggactaagggagccttctgaagaatagagtagcacacagcttgagaactgcagtgtggactgaacttgaagctcagctacatggtgttataagcagacttacaaaactacctctcagtttgggcaactgaaactgaaagtttactattgaatatagacaaattttggccaggcgctgtggctcatgcccagcactttgggaggctgaggcgggctgatcacctgagctcaggagttggagacaagcctggccaatatggcgaaacctggtctttaccaaaaatacaaaaattagctgggcgtggtggtgcgtacctgtagtcccacgtactggggaggctggggccagagaataagttgaatcggggaggcaaaggttgcagtgagccaagagcgcaccactgcactccagcttggagtagacagagcaagacttaatccccctaccccccaccctcccaaaaaagaaaaagaaacatgtaaaatacattttcatttaaaaagttaaattgtagtatattcacttttagtaataaattttttataatatgtcattaccaggcagacaaaaaaaacttcagatattttctttcaaagtgccttgagtgccttctgatagaactgctaacgagcaaaactagtactagttaaatagcactaatttgataatactaattattgtgaattgtttggatgacttctgatacatatattttactttgaaggggctttttctaggaatattgatatttaatacctgttatatcttctatttgtaaatgattattaagttggctacttgctctgcagagtattaggaatttcagtttttactggttggtggttgcatgtagttttgccaaacagaatgcttaataaacattttaagcttgttctgccttggctgtatattttagttcattttttgtaaattttctcaaaattaattgtaggctagcttacctataatagtccttaattaccattttgggggggaattcttttgtatagtaattgttctcccccaactagagtttatgtgccttctctgtccttctctgtccttcacctgaataatataatgctgaccatcatggagtaagcactgaacttataaatcatttgaattggttttttgatctgaaattcacagctgatgaaagcagttgaaagtcgatgttttctgtgagtcatgattttttttttccccaagctggagttgaaatctacttgaatatctctctcctatgacaaaggcaaaattaagtatcatgataactttcaggattcgaataaaataatcacttaatagtgatgtgaattttcatgaacattcgcagcttgaagaattattttagtatgccatgtatttatagtttaataaaacatatgtttctctatagttcaatttattttgtgcttgaaggaattttttttttttttttttttttttttttttgagagggagtctcgctctgtcgccaggctggagtgaagtggcgtgatctcggctcactgcaacctctgcctctcgggttcaagccattctcctacctcagcctcccaagtaactgagattacaggcacataccagcacgtccaactaatttttgtatttttagtagagacggggtttcaccacgttgggcaggatggtctagatctcttgatcttgtgatccactcacctcggcctcccaaagtggtgggattataggtgtgagccaccgtgcccagccagaaattatttttaaaactgtggttttgtattcccaggataaaatgtgtatcttttgtacagcttcacaaattagtatgtccatttacctatagcagtgcataaaaggatatttctttaaagatctatttgtataacattctatagtcccctctttattgaaagtactaatagcaatatttctaaaattatttaattttccagtgaatgccaaagagtcccaattatgggaaaatgtgttccattttggaaaatgctacatgcagttctcattttcactcagaaaaataaaaggcaatttaattacaaaggacgcaattttatagattggaaaaatatagaaatccagactgcttgccaagtggagtgagactgtgtgtaataaagtagattttgaaaacttatgctcaaaacacaatcaaaaagtcacagaatgtgagggtattatggatggcaaagagatatttggcaaatgtaagcagggcaggcagtccttcattttttttttttaacctctttttctaaatgccctctgctgaagtgggatagttatttagaggtaaggaaatgatggtgggaaaaaatgtgggagacatttttctctccaagtgcctgaaatcttgacattgttctctcgatcgatggaaataatcaaaaaggagaaggccatagccctggttaattaaccagctcactatttaagagcacaattctccaaaacagccatttatttctatctaataaacattaatctcaaataaataaaaacatattctctctctaattctattgtaagcaccttaagacaaaacctgagtcttctgttttgtcctaacaatggtgcaatgtgccctctagagaagacccttcctaagtgtgattgactgggatgggcttagctgttctacctttttctaaaggtggcactcccacataccttataaatgcaggtctagtttcatcattccattaatcacatgctgacatatcagcttcaattatttaaatcaaatatttacagttaacattagttatatgaagtcggtcctcagaaatcactgtatggaacacacttttatagttgacattgtttaacaatgtccttctaaatgttggccaagtaatttgcctgaagagcccttctctgcctgaagccataagtacttgaacagacagttttttggggagatcttcctagttaaaaatattgagctaatatctaaacttatagataacttcgggacatttgatttgagttaaggttagaacaatgctgcgtaattctggccacatatataattaatttaaattcttctagattaaaaaaaatgttgcagaatgctacagagctgcaaatgaagactagtatcctgttaaaaccatttgatctttaaactggcttgcttcatttcataatggatcgaagacaatggacacaaagtatataggcagtaaaataatgataaaataaatgttggtactctaaaatagaaataaattagaaaattaagaacaaggaaaacaaaacacaaatgcacacacatagcagctaagctggctcatacctcagggcctttggacctgttgttccctattcttggacccgttgcttccttagatctttggttttgttttactttttgagaaggaattttgctcttgttgcccaggctagaccataatggcacgatcttggctcaccacaacctcagcctcacgggttcaaacaattcttctgcctcagcctcccgagtagctgggatcataggcatgcgccaccatgcccagctaattttgtatttttagtagagacagggtttctccatgttggtcaggctggtctcgaactcccaacctcaagtgatctgcccaccttggcctcccaaagtgctgggattataggcatgagccactacacccggccaccttctcagatcttttgctagctgctgcttcttcttcttctttttttttttttttaaatggagtctccctctgtcgtccaggctggaatgcagtggtgtgatcttggcttacagcaacctccacctcctgggttcaagtgttctcctgcctcagcctcccaagtagctgggactacaggcgccccctcaccatgcccagataattttttcatttttagtagagacagggtttcaccgtgttggtcaggctgttctcgaactcctgacctcaagtgatcctcccgaagtgctgggattacaggcatgagccaccggcctgctagcttcttctttcttgtcatgtgtctcttttgagatatcactcttccagagatgctctccttgaccaccttgtctgaactatccttatagtccccttgtgtcatctccttttgctttcttttcttcagatcatttatcaaaatcaagttgtttcttgttcacttccatgtgtaagtattgttgtctgtctaccccaattcaaatagaaactccaggagagtttgctcactgctatatcccccagttgtgcatgtgggtaccaggtgacactttctaagtagtttaaagtgagtacatgttcttaggaacttgctatgtggcctgaagctttctagaactcaaaatgaagagagagaaattagaaaggcagatgcttaccactgctccccagggaataataatttgaaaaccagcacttaattataatagacttgtattgccaggaaccccatccagtgggtactgagctggtacagtgagaaaactgtcaaacagaactttgtacaggagatactcttattgtggtccaaatctggagggttctattagatgaagttcatccaaacatagaacttagattaagggagtagatgtatactccacagccaatccttcacaaaactcatttgtctccattgggttttttataagctctggaaaacaaacaaacaaaagagatatttaataagttatctatttttttccagagtttcccttgttctcgtgctgatgattaactttaactcttcaaatcaattgtaagctgcctaaaggcagaaaagataatgtatttaaatatgtcttcttattcttaggacagaagaaggtccctatacatggcagatgttcattaaggatcagggtttagtgatgttaatgctattatataggttcattagtcatataaaagttcattatgtgccaggcactttcaaggcaagttctgagaaacaacattaatgactgggcacagaatctcagactagaggacctcatctggtgaacttgggcatgaatgagcacagcaaattagtggcagagcctagggcttattctgctaataggagcaattctaatgttggcatgcactcacacagggaaatgtgtgatatatgtttccatcacatagggaaagcattaaaaatctacatgcttggactttactcctaaatcagagatttggggtctacagaggtatggaaaccctccctcaatcttggagggtgtattagtctgttctcacgctgctataaacaactgcctgagactaggtaatttataaaggaaagcagtttaattgactcacagttccacagggctggagaggcctcaggaaacttacaatcgtggtggaaggggaagtaaacacatccttcttcacatgataacaggaaggagaagaatgagtggggggaaaagccccttataaaaccatcagacctcaatgaacttactatcatgagaacagcagcatggtggtaaccgcccccatgatccaattacctccacggggtccctcccatgacacatggggattatgggaactacaatctagatgagatttgggtggggacatagccaaaccatatcagagggatacactgagatacaaggggataaagcagataaaaaggcaaactctagtcaattgaatttctcatatatctttcattctaacccgttcagatgtactaatttgtcacatgccatggttacttttccctttttagactttcaagttggaaaaagcttttttcagattcagaaagataaaatatcagccatgtattaaatgcattaaatgtttttctctcagctgcttttattccaaaatattttttttttttttttttttttttttagacggagtctcgctctgtcgcccaggccggactgcggactgcagtggcgcaatctcggctcactgcaagctccgcttcccgggttcacgccattctcctgcctcagcctcccgagtagctgggactacaggcgcccgccaccgcgcccggctaattttttgtatttttagtagagacggggtttcaccttgttagccaggatggtctcgatctcctgacctcatgatccacccgcctcggcctcccaaagtgctgggattacaggcgtgagccaccgcgcccggcctccaaaatattttcttaagggtcactgacaatcttgcaaggatgtaaatgacaagctgtatttgtttgttgacattatctatcaaagaggcttctaaacacttttgtgtttctgatgtgaataaaggaaatacaacattgaataataatccaggcaggttgcaggtggcataaggcttcagaactccaccatagaaatgaacgtgattggaaatgcagcaatcaacattttgacagaaaagtgaatgtttcaactgctttatgttcacaaattgtttctattttctttttgtattacaaaatgtaagcagtgtgagtttgtgtgtatatgtgtgtgtctatgtgtgtaaattcaaaggtttatcctgtaataagatagaatcagagatagactccttgctattctcaggttattttttccttgttcacatttttttacacttgagtaaaatacttctgcaagacatattggaatagttttgtgactaaatcctagaatttgcaaaatagtgaatcacaatataatgtttcctttggatactattttggccatacttggttggctttctggaagtatgaagtggaggtttcccagtgacacctgtagcagtgcttctcagggacatagaaagacaccaaattctcttatactgggattcatccaggtgaccagcatttgctttgcaacaatcatctgtggtgattgctcaagtgtagaagggttttcaagaactccatcatggagttttgtagtggcagattagctgtcctctacttctcctggagtggctgggattcttcaacaccaaaagaggcattgagtctttcttaattggcttcagtcagagagggtggggatatgtgaaacttctcagtctgatctgttcttcagctcctcagaaaagttctacagctactccagatctgtttcgataaaggggcggtggtgcaatgaaattattcataacagcccactttagaggtctgcctgaaaaaggtggagtatttttaatagtagatgtgttgagtgtcttatccatatcctttttaccgaggctggtgcacccagcccttgagatgccgagtacattatgttgcattcctcccaggggtggcacacaggcaatgactgactcgtatgagggtgtaaacgtgcagctcccttgcctctaggtgggatgtgggatctatgccagcactgtccaggataaagtcattaaatctagaaagtttacatggattcaatgaattcctctattcgaagtcttactatgtttaatagcaaaacaaaatagttacctaatgcagttcaatacattttgatatgttgttatgatgaagaaacatgaaaattctaaaaatgcccatttgttgattacagagcaattaagttttaaatgattcaagtgagtctaggaatgtaaatcttaaccattgcagaagtgaattaaacatgtttagagaaatcacaattagtcaaaaaaggtaaggtagattattctaccttaccacagggctcaacagggaactccacagggatcaagctcatctagatgccaaatctttgccagctccttcctctgccccatcctacatctctcactcccttacaggtttcccctaaatgcattcccttaataaatcatgggacaattattttcatctcagcctctgcttctgggaaacccagctaacaatatcgaatatggaaacatcaaacccctgaatataaccagggctgcctcttacttaaagactcatgcgtgaaatgacctgaagtgcttagaataatctaccttaccttttttgactaattgagatttctctaaacatgtttaattcacttctgcaatggttaagatttacattcctagactcattcgaatcatttaaaacttaattgctctgtaatcaacaaatgggcatttttagaattttcatgtttcttcatcataacatcatatcaaagtgtattgaactgcattaggtaactattttgttttgctattaaacatagtaagacttcaaatagaggaattcattgaatccacttaaattttctagatttaatgactttatcctggacagtgctggcatagagataaacatttaattgatagcttattttatgaaaaatataacatggcaaaggtttacagttctgtttaatctcagcagtggcatgttaagaagacaaacggagattaggaaacattttttctaaataaaatacctcattttatgtggtactgataagcagtatttacaacatgaaataaattattcctcgtatacttattgaataccttaaaagtatgtgctaggagctgggaacccagagtaaaatataggtcttgttcctaagaggatacgtctattatggggagatgaaaggggggttaggggcaagcacagacttgtaaataatctatgagtaaacgtctatacaccagatttgcctagaggatggtgtatttgcgtggcaggacattgggtacagctttagcagtgaaaagagcaaagtgcaaagagaacctagaagaatgcaccactgggagctgactattattattttcattaaaggtgagtattgcataactaaaatatttcagctcaatgacctagttaaataaatcgttgtaataaataaaaatgtcttcctgtctttatgtaactgctcattttgtgaaaagcataacttggctgcacaccttttttccgccttcttctgataaattcttggagtccaaaaggtatctttcatttagtagatttttcaaaatgtttatattcatagcaagttctggtttgggtcaagcaggtggtagaaatcataactgcctccagaaatcaggagggcccacgcagtacaggacttggcaggccctggtggcctaaggtcagccagagtgcagatgcaatgcagcaactatagtaccagcattattctagaaagttcttacttcttggaagtactgacttgtaagtaaaagagcattttaacttgatcatattcactctggagtcttctacatctgaatctaaaggggaactgtattcttcctgcaaatttgggattctctaaataaagttccagggcaccagaggttccactgggttagacctttgatttattttaatgaagagcccttcttctttgttgatgtctgacagcacattcacagtgatccagtcatttttggggtaagatagaaggaatccaggtagaatacaatataaaaatgtctcaaactaggcaagagaagagtctagtcctgtggtaggtcatatttgtcaaaatatttgctaccctcttagctgttcatcctcactgagcctctctcttcaaaagattatccttcatatcccaacactgtgaggcttgagcacgtgctttgctttgaacaatgaaatacaagggaagcaatgtaatccatttctgagccaaaaaaattaagagccattgagtgattctgccaggcagtctcctgggtcatctccagaatctggagtgcagagccacagtgacccataatggacattgtgtaagcaagaaataagtatttgttattcataaattaccagtgttttgggcttgttactgcaacattgacccattggtagaaacaactcagcttctggttaatagggtattattttaaaatccgctatgaacattcatgtatagtaagtctttgtggatggacacaggctttctatttctcatagataaattttgtaagcaaatggcaaactgtttacaaagtggttctatgatttcactgtcccactagcagtgtatgagactttcagttgctccactttcttactaacactttgtatgacagcatctttttaattttagtcattctaatacatgggtagtgatattgcagtatggttttaatttgtatttccctaatgactaatgatgtgaaacaccttttctagtgcttatttgccatcccagtttcttatttggtaaagcgtctgtttatgctgattttaggagaatagtttcttttcttattttcagattttgagagttgttggctcatatatataggcatatatatatatatatgtacacatatctatatgtacacatatatatgtgtacatatatattagcatatatgtgtgtgtgtttttcttaatacaaatcctttctttagatatatgatttttcaaatattttctccaagtctgtggcatgtcttttcattcttataacaccgtctttcaaacagcataaatattttacttttataaaatctagttatcaatttgttcttttatggattttggtgtttgtgtcatatatatatataaatatttgcctaactcaaatattttatcctcttttttaataatttattttttagtttaggttttatgcttaggtcttataaaaaatattgagtcattccatctatgagcatggtatatctcttcatttacttagtttttaaatttctttcagtattgctttttagttttcagtgtataaatctttcatatttcttgcacttaggaaggcattcagctccttgatctatgagtttaaatttattctcaccaaatttgaacgtttttcagacattacgttctcaaatatttttctgcctctccccctctttcaaggactctaatgacttttacattagaccacttttctgggaacaagttccagactggaaaagtggtctaatgtaaacgttgtctaatgttccactgggaacaagtactgtgtgtagtgctgaccattgttaccccgaaatcttgaaatcttgtgggtagtctttcctcaaccttgggaagtcagtactcaagtgaatactcactgggatcctgtacagatcttcagagttattgctctctgaagctgttttccaatattcttttctgtgaactcaaattgccttaatcttcctggattctcagcaatatctcctcaactcagaatccctgggttctcctttcctgtaccaaggattgccaattctcacaagacaataagttgggttacgataggactcatctcatttgtttacctgcaccccaaggatcactgtcctttgttacctgacattctgtgtcttaaaaacggttgttttgtatgttttggctgttttttgtttgttcttttttttgtttttttgttttggttgttgtttcaggttgttgaggataattcttatccctgttaatccattttgacagtaagtagaaataacaaaattcacttataaattagtatatatattcttggttcaaggagtaatgggctaaagtaattttctccaaattgtgttatttgtcttggccacatcattaactagcaaacctactcagttttaataaatggttgctttgccaaccattttttttttttcaaccagcccctctctgttttaaaaagaaaattaagctacccactttctgtttacttacatagaattccactatttaggcttttgaaaatagcccttctgacttgtaaataacttatttgactctgtgtgtgagtcactcacttttatgtagcttgcattgttaactgcatcttccaaattgaattctggtaatgctgataaactgttcaaataggtcttttgtatgtttgcatcagagaaagttttatgggtatgtttggtataattaagtgctttttctctgtgtgtgtgtgtttgtgtgtgtgtgttttaaataacatggcataatgctaaataatccaagcaggaataatttgtttttattaagtcagattgccttctgtacatatgttggggagtaatttagtaggttatagtttcagtgtaataaaaaatggtggggttggggctggtggaaatgatgcctttcttctgtgcctaagtgataatgtaaacataagtcaggaactaagagtatctgtctgggaatatataataggatcaaacctaagcacaaatattcccagaggtagatttttcttatgctgatttagttatgaactggtaaatttgttttcatgactcaatttctacaaagcaaactttattatatatatatatgtgtgtgtgtgtgtgtgtgtgtgtgcatttttaatgtatgttcatttttttctgttgattttttaaattatgttcattacataagttcctaactgatagcattctcatcgtaaacaggtcaaactgttcagataaaataaaattcccttatatcaccttcttatctccagctgatttctttcccagaaggtaatcactgaaatgagcttggtgtgggcacctctcaatggggaccccaagatccccttctgtaacatacctgccacttttgaggtttgaatactcatgggctgctctccccttttcaaatgcctatccctgcaccatgattttctgttttagtcagtcctatatgtcatctatctttcactgatttctctcatttctggtcatcaagggcacccctttttattctatcatttggctgaaaaagtggcaaacatgaacactgacttaaaaaaaatactccaaaaataatttgagtttagagcaaaagcaaatctatcattggttaaaattttttgtgtaggttgtataacaaatttaattttcatgaatttctaaggttgtgattttacatcatttgattttagctaatagtttaattttatggtaggtttcattagaggagataaaaggctttggtttgcttcgtgtctctggaaaatttattaaatctccatagttttcagaacctagcaaatggtaagcttgtttccattctaactttatgagatgctttgtttcttgtaaagtgaattttgagagtgctgtgtgctttagcatcactggaagctgaacctcaggtagtagcccttaccttggtgtatgagagtctgcatgagtgctgtgtgctatagcatcactggaagctgaacctcaggtagtagcccttaccttggtgtacgagagtctgcatgagtgctgtgtgctatagcatcactggaagctgaacctcaggtagtagcccttaccttggtgtacgagagtctgcatgagtgctgtgtgctatagcatcactggaagccgaacctcaggtagtagcccttaccttggtgtatgagagtctgcatgagtgctgtgtgctatagcatcactggaagccgaacctcaggtagtagtccttaccttggtgtatgagagtctgcatgagtgctgtgtgctatagcatcactggaagctgaacctcaggtagtagcccttaccttggtgtatgagagtctgcatgagtgctgtgtgctttagcatcattggaaggtgaacctcaggtagcagtccttaccttggtgtatgagagtctgcatttccaccttcgaagattctgaaaaggaattaaaaagtagtgtcttgaatattggataaacttaagattacaagaaaacattctggaacatgactttcctcccgcttttgaagtttttcacttctttttctctagatctttttatagatgttcagaggcattttaggttgaattattatgtgtttaaggaattctaagataataattaccaggaaattaactcaaattacataatcatgtattcgagataagatacgttgtattgttgtggtaggcaaaaatgccatgacccagcagaatattttaaaattagcaatgtattttaaatacttgaacgctctctttcatttcagaagctagcctgcacttaagtcagaaaacaaaagctaactgccacagtgaatgaaatactttaggaagagaggagagaaaaacaggcttttctcattctgtaattctgagtgttctttaaatgtgtcagaatatttgctttgtccattttctgtgtcaatttctacttctttcttcttgctcagaaagtttcataatgctccctctaacataattaagtcatttatctttcctccctctcttgctgtttacttccttgcttccttccttctctaccacttctagtttacatagtaagggacttctttggcttttgggtagtaatttaagctccaaatttcagtttcatgttatgtaaaacacaaatgatacttaccgtatttcacatggttgttatgttgaggactgagccgcattatgtgagaaggctaaacatcatgtccttaatactgaatatatgttcttttccccttttccccttttctttcttctttgctgtcccactctgagactcctttcttccaactctgagatgtagttttaaatcttttatgaaaaaaaaaaaccttatggagaaagggagaagaggtggattcatgagcaggaggagaatgataactgaacttttggcatcagcatttactatggctagtcaccattttaagcctgtcactaaatgaagttatattcatttagtctcattacaattctatgaaagtgctatcattatgtctattttatacttaaggaagcaaagtcttagattaaggcaagatcacatagccagtaagtaatggggtcaaaatgcagaccttaacattttggcttcagactctgtactttgagttcagccggtgtttgtggactttgccttaccttcctttctttttttttttttttttttttttttttgagacggagtctcgctgtgtcgcccaggatggggtgcagtggtgccatctcggctcactgaaagctccacctcccgggttcacgccattctcctgcctcagcttcctgagtagctgggactacaggcgcccgccaccatggccggctaattttttgtatttttagtagagacggggtttcaccctgttagccaagatagtctggatctcctgacctcgtgatccgcctgccttggccttccgaagtgctgggattacaggcgtgagccaccgcgcctggccgatttaccttccttacttaaccaatcatgccactagcttgcactggcctcaatacccaacgtttttcctaccttagggaccttttcctaccgtggggcctttgtattctctattccatcctttctgcaatttttccagatctttccagctcagcaaaattgccatctctccacattgccttcttcactctattcaaagtaacgaagggtacttcccccaaagcaactgatgttcccgtggcttgctttattaatcacaataggacatgatcttctacattaggttttcctccatgttttctggcagcctctgaaggatatgagccataacagagcatagacattgcttttttctttgtagcttaatctccagtgcctagtatcattcccagcatataatatgtttaatgtgaactgaatgagaaaactaaatgagaggcttaattttatacagcagtgaaggtatgtcccagacttataatttaaggagaacttactctctagaaatgtggagtagctggacgtggtggctcaagcctgtaatccaagcacttcgggaggccgaggtgggtggatgacttgagcccagaagttcgagaccagcctcggcaacatggcaagaccccatctctgcaaaaaaaaaaaaaaaaaaaatacaaaaattagccaggcaggggatgcgcctgtagtcccagctactcaggagactgaggtgggaggatcacttgagcctgggagatggaggctgcattaagcagtgatcgcgccactgcgccccagagagagagggagatgcagggtaattgatttgtacctttactttgaaatgtttaataattagtgattttctcagtcctctctttttctcatgggcccctttagtaaatgctgatggacaagattcacaggccatactttaaagccattgatggaggtagattttcttcccagggtgcttttttggcatggagttggctaagaatgtccttaaaggccatcatacataggtggaaagtagaaatcagttcaaagaaagactggcagagcagatcataagtcaatacatgaatcaagttggcctgtatcctaccaagtacaatcttttgtttagtggtgtatctactaccacactctcaaactcctaatgatactttaaaattaaccttcatgctcatttttataataatgttgaaggtcaggcaagagataatatcctcactttacaggtggaggaactgagtcaaagaagtacaggacttgtataaagaaaagctagtctatatgatgtctctaaatcctgggtctgaactactttaacgatattaaaagcttgcttgacataaaattttaagactgttacgattagagtgaatgtcagtgatatatgtgtctaaggaatttgataaatatacatgagatgctctaatgaattcaattgcttggaagtgaaggggaaaatgcacaaatttttacttaggctcatgcttttcatgtagaaacaaacattgaaatttggaagtgaaaaatctacctcttatcttgggtatatatgctgcctatatatatgcatatagtaagatgtttaagtttttaaaattaactgcattgttgagtatttgaaatacacatctgttatttgttattgaactttaaaatgatatatgaggatttaggtaaatactgtctgtctaaaattaattttggaaagtaactcataagatgatattttcaatacagttttgccagcaattattaaatatgtttcgagaagaaaattgctattcaaattacccatctcatccttggcactttctaaaaaccagacaaatattttttagtttgtgaaggctgctcataacagttacaagctaattaattataaaagatttagccatgcatttgaccataaaatagattggttgtggctgctggattatagttttagatgattttatgatccatgtattgccttgacttactgatgatttaaatgattgtgtgtgggtgatttaaaaagcaataagattaataaaatatttattttgggtaaaggtacagaatatgttttgaataaataaagtatggaaaaggtatctaaattcctcatacatttttaaaatcagttaataaatagtaaacatgcaagaagctcattaactatagaaatttagcctattaattagggagtgttcatttttaaccactatgttcattttctagtctagtacataatatttttcacaagtcttcagaacctcatttttccttttatataataatgactctccaaatatctttttgtttcttggtcattatttatcttttaataagacaataaaaccaataataaaagtgtattcctatagccaatagccaagaatcaaaatatgcctttatgggtttttcttttcttttctttttgagatagagtcttgctctgttgccaggctggagtgcagtggcacgatctcagctcactgcaatcgctgcctcccaggataaagtgattcacctgccctagcctcccaagtaactggaattacaggcacgtgccaccacgcccgggtaattttttgtatttcagtaagatggagtttcaccatgttggccaagatggtctcgatctcctgacctcatgatctgcctgcctcggcctcccaaagttctgggattacaggcgtgagccaccacgcccgaccacctttatgttattttatttaaccttcaaataattatataaaattgatattatttctttactccaccaatgcttattgggcaactaacaactatgaacccttctgagaatttggggtacagtggcaaaataaagttgtcaaagggccctgtccccttggggatcacaatctcaaggcggcggggaacatccggaaataagatagttatagttggtgatgcattaccagagacatgtgatgccataatagtgactaacccaaggacagtgagttagcttttgttgcataaattacccccaaaatttagtggcttaagacaactctttgtttaggctcatgtttcggctatttgaaatttggggtaggcccagctagctgtttctgctgatgtacgtcagactaagttcagttagaggaacttataggagagctgtgaacttccagatgagtcgaagacaggctgagggtatcctcaactgagatggcttatttctgtgtcacatggtggtggtagggatcccaagtacagcacgggtcattagtaaagcagacgttctggccttcatttcattcttttgagtgtatgctgtataaaaattgaccaaattatccacaaatcttcctgtaccacttgtcaaggttgaaaacccaagaaaaaataagattctttctatcactggagtgatattactgagcttttcagagtctattctcatgccaagatgtatgtttgttaaattttgagccggatgtggttttcattcagaaagtatttgatgatgacttctcaagcaaggaataactataatagcttatgtgcttttgggatattttaggtaagggtgaaaataataattctgagaaacatacaagtattgcttttttcttcacattccctaattttcttcttttgtacattccacggaacaatgccttctcatatattcacctgacgtgttgaacatcaatataggattgaatgaagcaaaaccttatgtatgagttacactggagaaaatcaaataactatatatttttttctggcattagaaagtcagaaagatatacagaattagtgccaatgactgtatcagttgttcaatgaagagaagataaagaggtcatatagcagagaattgtatttgtatactcttgtctataaaatttagaacattttggttgttgtttaaatttatataagcttgttttattcttggtatatgtgccaatatctaccctttaaaatccatgccattcaggtagctcaaaggatatactcaactctgacatttgtaataagtgaataggctaacttgctgcaatttgataaaaacagaagcacacattaagttaaatatttgtggagatttgggtgtgattcacaaaacttttctctcattttatttttcattaattcattcaaccaatgcatactagaagtgtattatttgttaggcattgttttcggtgcagggaacactgataaataaacaggtaatgttactgctgcctttgagcttctagtctattaaacattagatggacaagtcagtctttctactttttagaaacaaccagcagataatatttgttaacaaaagtcatgatgtaaggaatttactaaaggaattcagaaaagattacatatttttctggttacataatataagaaatttactgaaagattatagaaaagattatgactaaactgtatccagtattttagtgatttgtttagcagattattaatttaggtaaaggtcattttgattggaaacatctatcaaatcagtccatgaggtaaaagaaagcaaaagaaagcagagtctaacaaaggagacagaacattttaataagagatacctttaaattatattttataccatacgaattggtctctttgtttgagaattcaaatattttacagccaataccacatacatttacattcggattctatatactcttctagtttctagttatatacagatatttcagataataagaaccaaatcttgcctcaaatgctaacatcgtggatgacaacatagagcctactgtaatccattatgatatgagcaatgatggtaggtttgacagctgcatagggatcacaggagaaactgtacctgagctgtacctgtatcaaacaactacataattttttctgtcattgggaagtcagaaagatatacagaatcagtgccatacctgagagttcaactgtgtgcaaatagctcacaccgtctctaagtgttttatttctataataagaaaggtaagatttaccaaactctttcttctttatttttattatacatcctttattagtgattactagcccatgctcaaatgttagcttgcctcgaatcaaatcctagagtcactcttaattatttttatggtattaggtaagtgatttcacctccctaagacatagtttcttcttccataatatgagatttatgaggaaggtcctaacttgtagtagggtggtcaggaggcttaagtgaaatcatagctaaaacagttaacaattcctgaaaccacacaagtacactggatatcctgactattggtacttgtattcatacttgcatttataatacgcatttctcagataccccaacagttcatatccagacacccccaatggatacacctgagactgataccaggtcatcatttttcgttctcatgctgccagctacacaagaggcacgcactgtggatccacagacgaaacagacagaggctatgttccattcaagacctggaacagatgatcccttttccacgacaaggaccaacctctgccaaaacaaatcacttggcacaatttctaactctaaattaatgtcttcacttatttgcttaataactccctccatcctcgctgtcagatcaggctaggagagactccattggatgagcagtagactgctcttccccaggtgcctagcacagtgcctgatgcaccacacgctctcagtgtgtgcttgttgaagaaacaaagacacagtctgcccttttcattgaaagcagtgccccaaggcagcgggtccaatccaggtcacctccattgtgccttcccatgagggcttgctcaaccctctcccacctcctgtggccacctctctagagaagcttcttccagcttgccagacagtctagcttggaatgctgaacagcatccctggtccttctgaattttctagctggggaagcaaaatgtcagtctatgattaatcccacacaataggtggtaagaaacataccgatgccatatcttggcctgaggcacaactcttctatggagttgagtttcctgtaaattcgtggctgttgattgttagtgtgcagtcttaaggccttaacatgtatttataaacagtcttctttttaaaagtgcaggagcagtgtatatagtatgcggtatgccactattttttttaaaaaagatatatcgcatatatatatatatatatatatatatatatatatatatatatatatatatatgactttttcttgcttgtattatccctatgttttattttattctccaaagttgatattgttttcttctaaggaatgcaattccaaaaaaacaaatattgaaaccaataaagacataaaatttatggttaatagcttcatttcatttgttaaatgtaattaacgtatctttttattactaagattatttaccattttaatgtatataatgactattgcattagattttatttttaaaatgctgttacgcaaacttaaaaccaaaattaccagtgttctatgggacagctctaaatacagtatagctattaaaaatatatattcttaaagtgtgctaggaagaaaaaacacttgacatgaactattctgacatttaaatcttctcttattcttgtcagcactgccacagcaaatgataaaggtggtattaatagccatataattttctgaaatttttgtaacattttttaactcacaaggcagctggacatgtttacagcttgaaatcttttattgcattatttgtaagatattaatatatggatatcatatatgaaggaaataaaatgcataattattttctggcacattgacttgcatttaattaaatagttttttcctacttaagttcatctatctatcgaacatttctatgttctagttattctttgaacaactgccttcttatagataagaaaattttcggtttgctgattggtaaattggtagttactcctccatttttggttcttgttagttttctaacactaggttcaaactcttgaagaaaatattttgttctgcatgcacctttgcagaattcttcgaaaatttgctggcagaatagttgtagaaaaccccaattacagataataattttgccattttcctgatgacccctagagaggaataaatttgcaaaattagtttaattttgttttactcctgtgtcttgtgctttctcatttcctttcctcaagttatagaaaatacataagcccagtacagattcagtcccctcttccactctactctggccagtcacctctcttcatcaatcctggggatgactaaagagaagtagggaatatatgatccttccactgaccagctatgtgcagggacatttggcaactgagttgacctttatctggacaatgatagaatgagaacccctcttagaggttaatgtgaagatcaaattagttaatagaagggaagacactttggaaagtgaaccacaaaggccaccagtaggagtagaatactaggaaatgatctttctaaatgccaatctggtcaagtgcttcctgcagcctgtctccaacaatacaaagtatccaagctccttagaatggcattcagatctctaaggatagctgatggcttcttggactgccctttgattcctaagagatactgcccatggtttttcctttcctcaaattcctggtaagacacctctgtcttccttctacacactattcaataccgtcttctctttgacatgaccttttccttccacctcttttcacttctctcttacttgcagggttaggagacacctgctatgtgagtgtatgtaaaccatacttcacagagcaagccttaaaaaaataccagctttcatcctttttccttcccttcctattaaaccctatacagtcatatgtacaatgtattgaataagtatggtgagaaaagaaagtgatatatttgtatttcttgtacagtcttctacaaatctctgaaattagacatgactgtgatttttttttaaaataagtggatgttaggatctgggctaatagggttgggggtctgagggagacttttcattgtatacattgatttgatcttttgaatttttaatcatgggaatatatttctcatgtcaatattaagtaacataaataaaaatttagtataaaattttaagtctagaaaagtcgaatgtaaaagtttcattcactcgcctaatatctaaattatgtgacttacaagcatatggtggagaaaagaatatggctcccattatcaatatttcctcccttccccttgtcctatttctcctccattactcagtagaacactctgacatccttagggttgaagcagaggtggagaggagagttaaggagcataaagattttacttgaaaggcattggtttaatcagtttttggcagctgagcttgacagaaaaacaatgtatttctcagtctggctatggtcccattgcagatcaagagggggctgtgctctgtgtcacctccactctaaggcccagtgacggagcctgcaccgtttctaatgtttccggttactgtggcagaaggaaaaagcatatgacgaatcacacactggctcttcaaatgtctgcccagaagtgacacagtccccttgagctataagttcctggtcaaaacaaacaacatggccacacctaacttcgaagtgggcagagacatgcagtgacccatgtatctaaaaatactaaaaataatggtaaatagcactgataaatattttctgaaaaatataaatcaagagtggaattccttttaatttttcatttagttatagtttgggctgtgagatggttgtgttacacatgaaattcacataattagaaaactataggtgagtatgctttaaccccctgccccaacttcctcctctttctttgttcttgttttcttcccctcctctttcgcttatattttcctctgacctcaccctaaaaacacagtttaacctacaaggtaccagaataccaaaccaaaccaaccaaacaaaaacaacaacaaaaattgggtgccctctggaatgtttggctccaaaaaaaatattgaaatctatagcaccactgaaatgtctaatattaccaatgtggcattaataaatggacagtcgtgctcttttgtagcttttctctctggaaggaagatattggatagtttttgttttttagagacaaggtcttactttgtcacacaggctgaagttcagtggaacgacattggcttattgcagcttgacctcctgggctcaagtaatccttctacctcaacctctagagtagctaggactacatcaccaagccgggctacttattttgaaagttttggtagagatgggctcttgctatgttgtccaggatggtctcaaactcctggcctcagcaatcctcctggaggccttgatatccaaaagtgctgggattacatgtgtgagcccctgtacctagccagatagttcttactgtgacaaggggacaagaagccttttctcagggaggaccaatggcaattctttttaccccacactctcaacaatgattcttccaggaccatttccatttcttcagtctattgcctcctttctcattgagtggcgagcactcttgagacccagcagtttgctctatctcaacccactgtgacaaataggtaaacataggctgggatgtaaggaatggataatggatactggttttagttaccccaccagagacattttaagttaatgcaattgatgagtaaagcaacatgtatggttctctctcaccaggagaggaaaggaatagaaagaatagagaaatatagcctactagtcagtttggtgtttgttccaaaataaaccctaaaatctttgcagaggcaaattgcttattactgtaccgtcaagtgaaatgctccatgaaatatgttctgttttgctagacgtgtttggacaatttcctgaaactgttaaactgctcaatggtattaactcttctccaacaggccattagaaattttagcatttaaaagagagaagagggaaaatacagttggctcagttgagaagcaatctcttggagctggtaattatgtcacatctgtttggagaaacaagttggcctttaagagagtgaatggggtaacaatttaattaaagatgggttagattgcatggaaattacttgctattattattggaggaatctatcaaaatggaccactgggaaagcactgttttcactgtttcttgaggaaattgttcttggcataacagtagaatttaacttccttttctgaatgtaagtttcagccctgctgtatggaggagtgagatcattgcatagggtctgtgcacttccccagtttctgttttcttcctttcttactcagatgctgttcttttataactttgtttaacataacacttgagccaacatggtatgatctggtttgtggtcgctttctttggtttgcaagaattttggaaggtattatttgcgtttaaaacaaactatttgcctattggccatctggccagtaattccagcatagaattctaagctctgtgaacttgaacctaactcaattgaacttgctaatctaataataagtctattgccccacctcaatattaccagtgggatggtagaaggttttataagcacctcagtttttttctcagtgtgaaatcatctatatcaatctttttggtgctgtaccctatactgaacatggaaattccaccatttaacgtgctaaacagctagcaaagaactattccatagatattgaacttgaaaactatacattttaataagccaaagtacatcaggaaaaatcagagctttaatgaagctacaattgtagatatgttaaaaaagacaccaagttcattgtaaatgaatttccatttgttggttgattatttatagggtgaattgccaaaaaagatagagttaaataatcagtccatctaactgaccttaactaatgtaaaattactttctgtaagcccaggttagttataaaaagattgaccctttaccgcagtttatctgatataatctcagattaattaatcttgattagtttgttatttgcctcagatttttaattttaaaaggatattattggaattgtactttttaaaatagttttaataaaaatattacataggtctattcatataataaaactatagtagaaccttgaacaaaatagaggtgaggagagctgactctttacatagtcaaaaatccacttataactcttgactccctaaaaacttaatgactaagagcctactgttgaccaggagccttaccaataacatagtcaattaacacatattttgtatgctatgtattgtatactgtattcttacaataaagtaaggtagagaaaataaaatgctactaagaaaattgcaaggaagagaaaatatatttactattagttaagtggaagtggatcatcataaaggtcttcatcctgtttgtcatcacgttgagtaggccatggaggagggggcatgggaggacttggtcttactgtctcagggatggcaaaggcagaagaaaatcagaatataagttaatcttgcaactcaaactcatgattttcaaggatcaactgtaatttcttagtaataaaccctttagtctcacaagtgtcatgatttgaacaacaaattgtatggtcacgttggtcaccctaggtagaaatttgctgatttcagcaaattggaagttactgcatgattgtcaggatctgagaaagcaactgagaagtaatagttacaataagttacaaaccttttaggacggtgaacattttaaggcgtatgttttctccatgtgtcacaaccaacagtaaacaaagatcaaaatcatggtagaaaagcaggatttaatggacatcagagaaattgcagatctggaatacaaggcaataaaaatttacaacaaggaagtggtaagccagagagagctgcttcatggtggtaggcccagggggattggagagagtggtgccagaaagttggatagaaaagttaatgcaacaattataaagaagataagaacgtagtatttgaaaataaatattttaacaagataaatataatacaaaaaatggaataagaaaaatacattattatcgaatattctgtattgagttttggaagtttatgtgtctccttttctaatgccatgattttgcaatgcattattgttagtaatttttaggtctgcctatccaaattaggcttttgcagcatctaacaccctccaccctagctcacttggtgggtgagcctccaatgactacacccaaggaggatttaacacagggattttatgacttgcaacaagtcaggaggacatggggttggggtagttcagcagtgcctgtctgaacaaaggtgaaaattgggcttttattgggctgatcaagggggagtaaaggcagccaggagcagtcgcctgtcatgcttctacctatattgcatgtatagaaaagggaaaataaactccttcctgggcagggttttagtatgctaaggaggggagttattcaacttcaatccaactcaagcatcagcattgctgcgtccatcccagttttgttttgctggggctgaacttcttcctataactttttgaaacaacaagaactcaaggtgtgacagttacaagtgggccctttttcacagtgtgtacctaaacacgtgaggaccctggattacagaatgacagactcgaagtgactcaagttccggttgttcatctttagatggtaaagatggctgtacgtactatccttgcttatttccaatctattgtttaaactcttgtatatgtaataccgcagaggctagagatacaacctttgaccaaatgagtgaattcaagtaatccattactaatgtgatctggaaacaaacatggtgttgaatgtgcatatgtcagttctatgttgggagttcactataagtaggagttctctaaaagcacttccacgtagaatgcaatgattatttaaaaataagtaataaaaatgtgcaaatttaaaacatgtatatgctttgaattatatatatatatatgaattatattttactatgtatacaatgaaaactgaacagtaacctcagctattgtataaaagtgaaaccaacaaaagattttttggggaggaagattattttactactgacataaagaattgccaggaaacaatgacagcaaacacaaccaacttttagttgccatttaagaaaaattctttcagataatgcattcctttattacttgaacggagggcagaccactccgtccattctacccttggcacacatcacttcctaaactgtcttattgcttttaattgtatattttttcccttaatttcaattaaaatctataattcattagctgtcaaaacctgacctgtttgaagtagtagcaattcaacattaaacctcgactagtgttgaataatattttggggctttgtgttgtatgctacagagtgaccccccacaagttccttgcccatgtgtggctagacaatggaaatagttccgtgcttcaacatgttccccaaacacattccacaggagagcgcatccgagcatcaattcttgtaagacaactgggaaatgaagtcataatttgagctgaagcaaggaagattattaaatatattttccatgtgctttgaaaatatatgcaaagtaaagcaatcagtgcttgccactttgtttgtattctaaaagaaagctagttaaggtttttcatcaaactgtattcttctttaggcttataaagtaccatgaagaggaggtaaagagagagtggatatttcagtggctaaacccaaagttttttagcatttagactatggcaccctctagaaaagcaatttaaaatgtgaaaaaagagaggtcagttaaaaaatagattagatagataggtagatagatggataacaggtaggtagacagatgattgataaagagataggcagatcatagatagatagatagatagatagatagatagatagatagatagatagatagatagcatgaagatggttgaggtgactacaccctatgcttccttctgaagtttcgggaataattgttcattttccaagtgactgctcaatacaacattgctctgttaggtaatttaatgactggtgtaagtacaaaaaacattgccatctgctttgtttcttttggccttaattataatgttatcttcttttcagaggctatattgtgaaacacttattattcaccattatttctggcagtgattataatttatgaccaacagtgcagcactgaataatgtcttgattgattgactgattaatgtagattttgtaggtgataagggacaaaaagcctgagaagattttctggaaatgtaaaagtaattttattttctactatgtttgatgcccaaagatcactgtactgataattttagtgaataaagtgtcaactataacaaggagcttgtttattctatcaaccatgtgatttcaaaactggagcttgctttcacttttgaaattttccataagctaaatctaatcctctatatttacaacgaaattaattttctgagttatttattttaggataactctgatctttttcttttctttttctttttttttttttttttttaagatggagtttcactcttgttgcccagactggagtgcagtggcgcgatcttggctcactgcaacctctgcctcccaggttcaagcgattctcctgcctcagcctcccaagaagcagggattacaggcatgggccaccacgcccagctaattttttttttgtatttttagtagaggcgaggtttcgccatgttggccaggctggtttccaacccctgaccacaggtgatccgcccgcctcggcctcccaaagtgctgggattacaggcgtgagccaccgtgcccggcaaccctgatctttttcaaactgcaatttaaaatttactgatcacacagaactgaattgatttttaattgtcattctgaagaagtaattaaactttaattactacttctgaaagagagggtttttactaggactttttctgacaggacaataatttcattttttgcaatttttatttataattggcaaataatgattacatatgtttatggggtacaatgtgatgctatgtgtatatattgttgaatgattagatcaaactagttatcatatccatcacctcacacactaatcattattttgtagtgagaacacttaaaatctgcactgttagcaattttgaaatatatattattattaattatggtcaccatgctgtgcaatagatctcaaaaattattcctcctgtctaactgaaactttgtaccttttgattaacatctctgtctcagcctctggtaaccaccattctactctctacttctgtaagtttgatttttttagattccacatataagtgaaatcataacagtatttacttatctttctctacctggctcatttcacttagcgtaacttcctccaagttcattcatgttgttgcaaatgacagaatttgcttcttttttttaaggctgaacagtgtatatatacatacaaaacatttctttatccattcattaactgatgaatggagataaatatatataaaacatttcttcatccattgattaactgatggacacttaggttggttccatatcttgcctgttgtgaataatacttcaagaacataggagagtggatatttctttaacagttgatttcaaatcctttggatatgaacatggaaatgagattggtgaattctagggtaattctattttcagttctttgaggcatatctatactgttttccctaattggctatactagtttatattcctgccaactgtgtacaggggttccctttactccacattctcgccaacgttcgttatcttttgtctttttgatgatagccattctaacaggtatgagctgatatctcactgttgttttaattttaatttctctgacaattagtgatattgagcattttttcataaactggttgaccatttgtatatctactttcaagaaatgtctatttaaattctttacccatttttttaaaaaattcgattctttgttttctgctataagattgtttgagttccttatatattttggatattcactccttatcagatgtgtggtttgcaaatattttctctcgctctgggttgtctcttcagcacagaaatggacagtcgcacgttaccacctgtatgatcattattttaaacacaagcaggaaaagcttttgggttccaaagtttcagtcattatgattgaaaaactgccaaactggtagtgaaacatttattggattggggattaagctattcattcttttcgcattaaaacaatgatgtagttttattcgtaaatctataaagttaagtgcacagtcatcacttttagtacgttctgattcattgaaatcctgtaaaattttatggaaaaatctgtgtaaacaagctttaaataaggcaatattccaataccaaaactcgggatttaggcataggtgctatatttacaattcttaagtaattttcatgtatttcacatatttttaaaactcatgttacaaaatagcctaattctctttactttctgtgtatgagggaggaattaacattttgtaatataaacctcccaaaagttattcagaatatttctaaaataaactgttttagattcttggagaaattctgtgatgtcaaaatctctttcctttttttaaacaataaaaaacattgtggctttgtttttttaattgataaataataattatatacatttatggggtgcatttatggggtgcaatgtatacatatatcaaattttaccccatattgtacattgggtacaatctgtaccctcataatacaaattgtaccccaatgtacaatatggggagcaatttgatacatgtatacattgtggaaggagtaaatccgactaatatatccattacctcacgtacttatcatttctttgtggtacaaacatttcaaattcattctcttagcaattttgaactatacgttattattaactctagtcacctaatgtttaatggatcaccaggaattattcctcttgtctaatggaaactttgtaccctttgaccatcatctccccttttacctcccaccctctcccaacgtctggtagctaccattctacttcctacctctacgagttcgaatttttagattccacatataaatgagatcatgtaatatttgtccttctgtgcctggcttattttacttagtataatggcttcatttttttaaaatgtttaaaccaaaggtttcaatacataaatctagacacaaacaagtactgtgtgattccattttttataaagttcaagaacaagcaaagttgatcaaagacaagagacaagaaactttcagtagtgttggacatattctttaatctttgtggaggccacacagggatatagatgtgaagaaattcactaagctatgcagtcagtattagagcccctggatgtacatgtgttatgcagtaatgaagggcacacacacactcattcattcacacacagcaaaagcaatctatgaagtgacaacacgacacagtgaacactgttttcatggtaaagttgcaataagacaaattacattatttttacagtataaacaattatattcaattaaatgcacgaagtgtgctagaatatattggataattcggaacgaatacctatactgcaggtgctgaagccaagagagaaacatccccattgaagtattgtaagaattctgtcccccctgccagttgctatgagatatcactgaaatatggtagtgttttctaaaatctactgcatgaggataggacaaacatgctttcagtgaaatgataaaacgctaccagaactaaaagaaacaaaagtggtcaggtgcagtggctcatgcttgtaatcccagcactttgggaggccaaggcagaaagatcgcttgagctcaggagttcaagaccagcctgggcaaaatagtaagacctctgtctctattaaaaaaaaagttaaaaataacaacaaaaaattagctgggcatggtggtgtgtgcctgtagtcccagctaccaggaggctaaggtgggaagatggcttgccccagcaggttgaggctgcagtgagccaagatcatgccaccccattccagcctggacaacacagtccctgtctcaaaaaaatcaaaaaagaagaagaagaaaaagtattttaaacctgtcattaagaagaaaaaagatgtaattacacacttagggaggccagagtgggcagattgcttgatcccaggagtttgaaaccagcctgggtgggccgggcatggtggctcacgcctgtaattctagcacttttggtaggccgaggtgggcagattgcctgagctcaggagttcgagaccaacctgggcaacacggcgaaaccctgtctctactaaaaatagaaaaattagccaggcgtggtggcgtgagcctgtagtcccagctactcgggaggctgaggcagtggaatcacttgaacctgggaggcggaggttgtagtgagctgagattaggccactacactccagcctgcgctgggcaacagagcgagactccatctccaaaaaaaaaaaaaaaaaggaaaaaagaaaccagcctgggcaacatggcaaaactccatctctacagaaaaatacaaaaaaaaattagcaaggcatggtggtgtgcacctgtagtcccagctactcagaggctgagaagaaaacagattatctaccgtaataaagcaagaaacccaatccctaaacaatactgtgccccatagagtaaagccgtttcatttctcttttagtactttttctaccctaacaaagaaaattgtggctaaaagttaaaacaaaaacagtatctttttgctagtttcatgatatatcttgtatgtatgtatgggtgaatattcttatattattatttttggttcatgtaaagtaatttttccaagtgaatatctaagaccaatgcttctgaaactttaatagtcatacaaatcacctgaggattttgttaaaactaatattcatctccaggagttcaggggttaggctaagattctgagtttccaataagtacccaggtgatagtaatgctactggcctacacactactctttgagtaataaggtcttagattaaagtggacttgggcccactaacattgattagcttatgacaggaagacaaaaaacaaaaacaaaggaacaaacaaaaacatagaaggtaaaatgttaaaatcaaggcacaaagtattgctgtatggaaagtgtctgaattttcaatatattcagccctggaggaagagcttcccactaccacttatttactgtttctgttctaaactggctataatagcccttcaattatagagctgtttcagtaatagcatctgcttcattataacagcagttttattaaactaatagttgttagcatgaagacaccattacagtaaattacatttataattatggctctaaatatactcaggttgcatacaattattaaaaatttccaccctaatcatttacctttcctgaagctttcctcctatcacatagatgctgtgagcgtgtgttagtgtatgcaggcttttctatgaggctgctttcctatatcccatacaattattcaaactgatgcctggtgtatctagaaatttgtattcctagctcagagagcagctaattagaacctccttcccaatctctacttcccacaatctgggtcatttccttgtttagtgccttgatcagaaataatttattgtctggttgtgcatggctttgagggaggcacaatataaagaaaagttcatataagaaatgtgcacatttaacatcaatgcataacaaacaccccaaagcatagtggcttcagctaaaaactgtctatcattgcatttgggacagctgggagtgcttatctagatttggctcagctgggcaggttagttaaggtggctctgttacacagtgtctttattagtctgttctcatgctgctaataaagacatacccaagaatgggtaatttataaaggaaaaaggtttaatggattctacatggctggggaggcctcacactcatggcagaaggcaaaggaagagcaaagtcacatcttacatggcaacaggcaagggggcgtaaggaggggaacttcccattgtaaaaccatcagctcttgtgagacttgttcactaacatgaaaatggcacaggaaagaccctcccccctgattcagttacttcccatcaagcccctcccacaacacgtgggaattatgggagctacaattctagaaagacttggtctgggacacagccaaaccgtatcatcatctcacatgtcccctctgagcccaggtcctcctggcagtgacccaagcacatgagaacacattcaaccatgacagcacatttcaagcctccgcttcattgcttctgataatattactctggccaaagccagttacatagttaagctcaacttgtgttaattttgcccacaatgaggccaaagcaagtcacatggccaagatcaacataaatggagcagagaagtgtcatctcctatggaagtgaacagaaatgagtgatcatttcagaacaacaacctactctatcagagatagtttcccttttatacatgtaagtacaataatgttgaaagtctctgagtttattttcataacatgctaaatagccacagtcttatttagccaaattacaaacattggaattgcatggtttcttttagaatctaaggtttttatagaaaatataacatcatatatatatatatatatatatatatatatatatatatatatatatgtattccattttgatgctatatactactagtcagtcacctgtaagagtttttgactaaagttttcggcaagatagatatagttgagtcatggtcaaggtgaaaagggtattcactcaacaagaaaaccatccatcaaagatttcctatgtgccctttgttacggctgtgcagctaagtacaacacagttccaggctttacagttcttagagtgtttacagacaaataagtaagatgctcaatatgaggtggtaggtcctgtgtactgggtgtatgccagatttcacaaggagtgagtttaaccactggacagcagagtgggtgctagagctgactcttgaaggatcagaaaaaattcaccacaatagaggggttgggcgttccacatatagagatgacattgggctgcattcggggagcccacaagtaatggcatagaagtgtttgtgtctgatatccccttccagacatcccacaacctaaagagctagacactgagggggcctgcatggtgagcctagagccaactcaagatgcaggaacaaaacagaatttattggaacatagaaagatatgaaacaacagtagttgctctgagaggcgtcgtctacatttgaaattgctgggtgttgtgctgaacccttattaaccccaataaggaaggcacaagattcaagaagccaaagaagagacccagaggcaacaaatgagacatggggttttattaaggctcacatacaggggagagaggccagtggtggtgagctaaatatgataacctcatagcccagtggcagtgggctgggcgggaaaacagcaactgctagcaatcagcatgcactttatatagcatttccacttaacaccctcccccagtgacctccacctggcaaccttcatattgtaacctaaaactctgggcctcaatcccctgtacggcctgtgttccacaggactgaataggatgggaccggggctcagatgttcctcatggacaaggaatgaatctctggattggctactcctggattccctagttcagaacatacattcaggtgctatacaaggtcattctaaggttatgcttaagttattgctgtcaggtatgtttatcctacaccaggttgataagacaatgatgtcatcagtcagagccacataaacttgacagccattaaaagtttatcttcctggctaggcgtggtggctcacacctgtaatcctagcactttgggaggctgaggcaggtggatcatgagatcaagagatcaagaccatcctggccaacatggtgaaaccccgtctctactaaaaatacaaaatttagctgggcttggtggcatgcgcctgtagtcccagctactcaggaggctgaggcaggagaatcgcttgaacccaggaggcggaggttgcagtgagccaagatcgcaccactgcacaccagcctggtgacagagggagactctgtctcaaaaaaaaaaaaattatcctattttatttgtttttaagataggttctcgctctgtcacccaggctggagtgcagtagcaatatcataacttacttgtcttcattgactaatgaatcccaacatgctgagtttgattgtcaccttttctctcccagcttcagcaatactatatgtttagaattatagaattttttcacagctcacaaaggagcctctcaggggtgggatgtaggataggactgaagaaagaaaaccctactggggagaaaatatcaagtggagactgagtattcatttctactctttgctaaagagtagttaatgtactcacagtttatgttcagaacattgtcagtttcagagaaagatttcattagttcattagtttatctataaatttatccatcctgtacttattgggcatctactacagcagcagtccccagcatttttggcaccagagatgggtttcatgaaagacaatttttccatggaccagggcagcaggttgggagggctgatggtttcaggatgattcgagtgcattaaatttattgtgcactttattttattattacattatagtctataatgaaatacttatacaactcaccataatgtagaatcaatgggaaccctaagcttgttttcctgcaactagatggtcccatctgggggtgatggaagacagtgaaagatcatcaggtgttagattctcataaggagcatgcaaagtagatcccttgcatgcaaagttcccagtggggttcttgctcctataagaatctaatgctggggccaatctgacaggaggcagagctcaggtggtgatgggagcaagggggagcggctgtaaatacagatgaagcttcacttgcttgcctgctgctcacctcctgctgtgcagcctggttcttagcaggccacagactgatagcggtccatggctcaggggttggggactcctgtactacagcatgccagacaaaatgcccactgaggttggaaatgaagcgaaaacagacacactccttgctttctcggtagcttacagactggagagtaagaagggcattcctacagtggtgaatactatagaggagtagtagacaacgtgtgtgagtgcatttagtatggagctgggagacatttatgggaggaaagataaggaaaaacttctccgatgaagggactttaatctgacatcagaaagaagagtagtagcaaactaggtaaacaaggatggggatgaggaagtaggaggtacaaaatacaaaacgaaacaaagcacagaatatctcccagaacaaagccctcttcatcctgcctgctctctctcccccatagtgattgacagtttgaggaagggggttattcttagggatcagaatatttttgtataactgcttccattttgtataattgcctagtttcccagggtaaataaaggcaggagacacattcagggccaaatacagaactctatattcttacttgagaaacacaccaaaatgatatgcaaatattactatgtagtatttatgtcttccttctctccccaaaattcccatgtgaaaataaattttctatgacctatatactgtcattttgcttaatcattttaaggcaatatgaggacatcatgtattaaatcctggagaattcttagttttcagatttcttgttggatatttcctgatcaataatgtgcaaagggagatgatatttgggccagaaccatcagtttaagcgtctctatattataagaaattctgactcaggctacttaatgtagtttcttttttaaagcatgaatgctttaaagttcatgttttagtcaagaaggaattgcattttctcaaacctggcaggcccagaaaaaagctacttagaaaatcacacttaggtgacagaatgataagaaaagtccctttaggggccattagcactttgcctgaagaaaaactgttagtggttcttcctagctttttaacttacagaagcagcactgttggaaagctcttggtaaaaacaacagaagtaaagcagtttattttggaatctcatgttaggaattccagaatatcccattggttaattttaagttagagtccttattattgcaatttccatcataatagacatattatatttgtaataggtggtgggacaaagactagagtttggatatatcatagaaatctatataccaaactttcattaactattttgccagttaaccatggccaactgatttttttttctttgttcacctcctccataaagttagatctaagattcaagtaacaacctatgcacctttttctaacagtactttattaaagtacaatttacctttagtaaaatgcacaaatgttaaatgtacatcacacagaactttaacaaatatacaaactcatctaacatccagatcaagatatggaatgtcaccccaaaaattccatgttgccctattttagctaaccactccacgactaaaggcaactgctatccaatttctgtgggtataaataacttttatttcttttcaacttcatatcagtaggaccatacagtatgtagtctttggggtctggcttcttttactcaaaatctgtgcattttgaggatttctgaaatattaaggatagcccagggcttctgcaaatgtcagatggacatacaactcaatttatataaacactgtgggaagtaagctaatatttgttaacctgaaagtttctgattatcatgaaatgtccctaggcagggactatgttgttagctacacaatatctaagaaaactatcctaagacaaattaaatatagaaataaaatcacaggcaatagcagatatatctaagcttcttatagataagctcatcccaagtactcttgaggtgcaaaaagaaaaggctaattataaattattcttatccatttattgaggctgttcccttaagggctaattctaggtaatgcttcattaaccttgtatcagttacttgttcttgaatttcaaaaattcattttttccataatttttattaattcagtgaggccctccttctcatttgtacaaattagtaagatgtcaacctacatgtggagttctggagattcatcttaagacttataaaagggaaaaaaaaaaaagaataagtaaaggtattgagggcctactacgtgctgatggccaaggtactttcacctacattaacaaatcaaatcatttcaataggccctgtagggtggctcatgtctgtaatcccagcactttgagatgctcaggtgggtggatggcttgagcccaggagttcaagaacagcctgggcaacatggagaaaaccagtctctataaaaagtagcaaaaattagctgggtgtggtggtgtgtgccttcctcccagttacttgggaggctgaggtgggagaatcacttaagctcaggaagttgaggctgcagtgaattgtgatggagtgagactgcctaaaaaaaatcctttcaataaattatgattcacagaatccaatacatccaatgatccaatggaatgctagttcaaatacattggtacttaagcatggactgcattctaaaagttcacctctaactcagctattttatcatagaaacacagatatataactaaacaccactttttcaagaaaaggtaaaattgtgaattgcatttcaaccacacagaaaccaaacaaagttcgggagtgcaaactatattctccttctttcttaacatcagatttttccattgtagcaaatgtgattaggcagggccttgactaaatcactagaacagtgagtgctgacactaaagctggaagctaaaaatgcctccagaagattgtccttgagagccaagagtcaccttctcctgtgataggcagtctgctactatccccatgcaccctaaagctggtatgcaaggactctctaatcctgtggtatgaaaattcagtcgcctcacctcaaggctagacagatacagagatgcaatgtaggatctggagctccccttggattgaacacacatcttgcttcccttcttcccttacaagcgtttcctgagagcccttcttcaataaatcattttctaagaatctctgttacctccccatctcaggctctgcttctaggggaaaccaatttaatacacccattttatctatgacatcatcctcattctggcctgtggttacgctaacaatttatcttctcctggagtccactaagaaggacaaaagccattcagaatagaccaataaaattcaaagcctagtcttcttccagcaccctatgatctacactttctccccaactgacacacgtggtcaagcagaatgcaacgcccttttcttggaacccagaaaagacaaattaaggaaaatgagtttggaacaatgaaacagtctcctgtgcaaataaagcagacactaccattttaagtatgaataattggaaaacaaggcattgaatagtcttaattacaataagtatacgaagcttgcattagtcttaattacaataaatataagaagttttaaaactaagtgttctaagccacaaaaaagtaaaatatgtccttgtttgtacattatttcaaacataggaggataattaagataagaatgtgaaataaaggcttatctttatttaagactaatttgttgaggcaagaaagttggtggggtgggatgaggcccctgcttctcaaataaggaaatcttaaattaaatcaatgccagtcaattgctgggacattttagtcaaactgggtgtaatgtgctggttaagctatcaaataaaatgttggccatagagcatgattcgtggtcctcaatggaatcggcagttgaggatgagattgctgtagatgctcatcatcctctacagaagtgatgaactgagagcttgtatctttgaaagggtcatataatccttggacaaagggggtagtaggcctgttatccctgctgcctttattcatccacccatctaaacaaccctcccctcagtgtttactgaatgccaactctgtgccaggaactagtctagacactagggatatagtagaaagagaatgtatacggctcaggaagttgtgatttagtgaggattcaaaagaaagattagcaagtctttggagcaaaaattagagtcaagaggaagttttgcaaatgatcctgatcataacaaatatgtgtgtgtgtgtgtgtgtgtgtgtgtgtgtatggagagagacgacaacaaatatatatatatttggctctctctctctctctctctctctctctctctatatatatatatatatatatatatggagagagacaacacctccaaagaaaagagaaaaaaaggaaagcacatgaccgtgaacgaatctagcagtatgagaatttgattgaaagtctcagggaagacctgagatatagtgaatagttggccacagatatggtgttagtagcagacatcagttgggttactgaacaacacttttaaacccactaaaaggggacaaatggaatttactcagagcttagtatattaaggttactcagatcattgcgcattgggagggaagaagatgcttgtgcattgtcagagttgaaaactagagactgtgtgcctgagaaatgcccagtgagacacagaggaagcaactccacggatgcagaaaccatgccacccagaggcctgcatggggagcgtgtgttgtatggaatcaactgggcggagttaatacgtgaaatttcacattaactaattaattaattggttaatcaactgattgattttaaaataccaaaaagcttccaacaatcatttcaaaatttgatatatatgttgaaaaatacagcaacaaaacaaagtataaaatacaaacaaaatcttaatttatttcaatgctatgtattaaaagccttcatatccaaaaaatagcaagattgttattaaatacatttacatactctagtcaaaactataatattctataaactaacattagagaagatgcttgaagaaaaataaacatttaaaatacacccatatggctttaggaattcagaaaattcaataaatcatgaaaaaaatgaacctcctgggttttgttttgttttttcctttgagggaggggaggggaacactatgagttttctctttctttttattttttcagtttctttctacaggatacctaagcctaggtcaattgtttttaataacttcgttttgctaatcggtcatggcacttgtttctctccttaaatgcaaattaggatgagaataaccttgtaaacgtgtctttgtcttctcaaggtcatgtttggccaacagtatcagtcagggtttctttttccttttttaagcaggcagccatgttctgattaaatatttataagtctagttgagtaaagttaaacggagcagatgaggcaattaagaagtaaaaccaagtgtcaaactgcagggtctccttaaatgatgcaagaccttgggatcctgacacttttcattgacactctttgtaagccagagttgttttgtttgtatgaaaagtggcagtgctgtctaagatttactgatccctgtttagaagtcatctaaaaataatatctgagtaactcaaaccctctccattttccccagaaatagttttactgtaggggtgagatgtaggagagggagggagcgtctgtgtactgccacagctgggaacattactgcacctacttcctagtgccttgcaggcatctttgggacttgctaagaacctttggagaagtgtaagcagaggttaattgttcaaccacctgcttttagaaagatataaattttatatatgtaaaataatttttaaaatcatgattaatagcctatatcccttcagttacttttacaaagccttccaatgtccagaaggaaactgctgacagtgacatttatggagaagggggaaaaaaaaagtaatttttcaactcaaattgaagggcagtggatagagaggggaacataaattcattataaaatatcttcttaacccatatatatagccaaaaaaaaaaaggagctaattgcagaccaattatggaaaaaacctgaccttgggagaaaggcatgctatttatttataatcagtattaaggatttagaagcattttcaaggtttgcatttatttggggttgaaatgtcataaatatctgtcagcatggcaatattctagttaatttgattttggtgttgataaggccaagttcaaataatcaatctcaattaggctgattaatttcacactaaaaaactgtactgaggggacacaatttacttaaaccctaattgaccgtgttgtgcctttgggcacagagagatcttaaaaaggagaaatcagggaaatcactatacacaaacactggaaaaactgacttaattttcttgtttttaccaacaattggttgtgttgttgtcaaatggataaagtagaactttaaagaaaaatcaactttgtgcagtctcttaaaaatacctgaatgaaatgaaataaaattcataaaattctatccaacaattgaaaaaaacagctttttttttttttgcttggaggctagaggatgatgatgagtagctctattctgttagctctttctgtagctctattctgttaaattgtcatgacatttgttcagctcctaaaaaatgaaaattgggattgaaaatcaatttttagtattttttttccaaagcatcagcatacttgaagcctgtgttactatgaatggttacccttaaaatgaaagaatagttgttacttttggagcgggatagtaaccaggatagggcatatgagtggcttatgaaacacactaaatatcctatatcatgatcagcggtggagatacctgagtatgttaattttgtgaaacctcattgatttacacgctaatgatttatgcacatacaattttacttccttgatactctaattttttaagttgtaaaaaggaatttatatttaaaaaaaggttggactcctatgttcatttctataaatgaagctgtcacacagacctgaaattttatttgagcactggctctatcattttcttttgatgatgatgtttctttgatgtatgcatttttatcaaatatatctaatttgatgtttctttgatgcatttttacctagcttttaactgggacctggtttctgtagtgtaaaaatctatttgcaatttctagtgtattatactatttaatgccttcttctcatttggaactagaaaatcacttgggttaaatggtgtccagctgccttcagagataagccctggctttgacttattaatacatttccatcggcctttcctggtaataaacattcttactgtcctccaatatggtaaaatatttagcgtaagagtagtcttggctcacagtatagttgttgaatccatgctgtttttcagtcattggctgctctgttcattacattctatacaattttgtatactgatgtcttggggttttaattgaattttaatgaaaaaatggcccggattagcagtaatatggccagctgtgggctgcaatgttaatatgcacctactgtttcaatttgctggtaaagctgataatgactgaagagggcagctaatgcaaaaaactatgcctggcaattacatcaagtcaggttttcacccctcatctttagcagcttgcctccagcttttaataaagagcagagcaaaacagggccagttcaagcatcctctgatgtttgtttagacttttctctgttgactgagcatttgtaattttaaaggtctggtctctagtgtagttatgggcagtggtgtcagacacatctgggtgatgccagacacacttgagtatgcattcttcagccatactagccctgtaagatttagtaaggtaattttatatcttttagcttcagatttcttatacagaaaaatgggtataattgtatctttttcttggattattaaaaagattaaatgaaattatggatataaattccttaaatagcacctagtatccatttctgagctcaccaaatggtgaccattatttttgttaaatatgcttcaggttttccccatcaatatcaaaaattaagattggacttggaataaaagttctattttatattttaaatcttacaaatgaaaataaataaacagcatggattcaataactatactgcgagtcaagactactcttattacactgaatgttttaccatattggaagacagtaagaatgttggttgcccagggaaggccaatggaaaggcaagtcaaagccagggctagtaaagtatatgatttcacttatatgaagtataaacacaagtacaatcattttatgggattaatgtcaaaatagtagttccttttgtgaggcatagtacagtctggaagaagcagaagggtttccaagatgctgaaaatgttccatttcttcatctgggccatagttgttgtattttatatacgtaaaaattcatcaagctgtaaacttaagatctatgcacattattgtaattatgttacaactcaataaaaaggaaagggcttagcaacaatttttttaattaattgaaaaaataaactagcacagacctttgggaaattaaaaagtcataacagtgctcagtaatcccacccctagtttctctattgaatattctgatagcagaactattccagtaacagataaaatattatgtatatggaggtgttcaatgcagcatttcctattttagaaaagcgacactgaaaacaatataaaataaatgtctaataatgtggtaacaatgacgtaattgatgatgcatcaattccaaaattatgcagtcatcaagaataactacattatgtaaaatggtgcagccactttagagggctctttggcagtgtcttataaaactaaacatacctcagccctatgactcagcaattccacttctgcatttctaccaatgtaaatgaagacatatgaatccacacaatgacttttacatcaatgttcataacagctttattcataacagccaaaaactgaaagcaatctaaatgtctatcaataggacaatggatgaagaaatgatgatgtattcatacagtgcagtaaaactcaggaatataataacatgaatagatctaaaaaaagttgaatgaaagaagccagacacaaaagttattccattcataacaggttacattctaagttattccattcatacgaggttctagaaggggcaaattagtctgtggtgacagatattagaacagtgatttacctctagtgggaaggtcaggaactggcttgtgatgaagatactctatcttctttggcaggatctacagcagccatcatatgacactgaggatctgcccagtaaaaatgtaaaagtttcagtcctaaaattgttgagctggtgaaccaatgccgggatttccgtaactcttacataaaagaaagtaaagccttatttgttcaatccattatagctggtaacattctgtaaaagaggacgcaaaaggcacccatgaccaatactagataatacgtattcaatcattagacccttttatgaaaacaaggggcgaaaagtgctgcgacaattcccagagaaattgaaatggatatttcctatataatgctaaaagagcatcagatatgaagtaagagggtgtgaggagaagctgctaactacataatgcttcaacagtgaaaaaaacagttctacacaataaccttctaacgattcctcattgtggacgggtaggtggtttgtacttccagtcccttcagtatcagatgtttatcatatatcaaaatcacacacttgatgtttttcctttgtactgaaatttttaacttgttttcattctatttcaagaaatattgatgaatcattttgaattatgctgttatgaagacattcatgtaaatctgtagtaacatcataattgtatttaattatgtatccatttatcattttccaaaagattaaaccatgcacaaaaatacccctctgtgttctttacggcagtattaatagttgcatatacctaggagaaaaaggcaatttaaattttctcccatgttattttagatgtattttactcctcctcctcaaagtgggtatgaacagcaacacttcccccagaacctctcgcatatgctcaaggaacatttgcagggattttatatagtccgtcctctctttggatatgtttttaaaaataaggaaaagtttcatcttttaaggaagtgccttttattgacattcaactagttactgacagatttttactgttcagtctcttaaaagggtttgaaggaatgagaactgggtagttgtgttgctggtcattttaacgttattttatttattttctcagtagttaatatacaagcattgtactgcagtcacaaaattcagaaggaggaaataagctagtctccctcacaccctccttctccagccatcctgtgcccttccccagatgtaatattttcaaatagtttaacgtacgtttctgtgctgattactttttttgctatttccaacaatgttgctatgaatattcttgtcattgcccccaagtgcacatgatttcaagagttctgtaactcttggagtataacaaggactagaatttttgcattgtatgctatgagtattttcagcctagctatgtataattagttactgttttccagatagttctcatttatcttcccatcaggagtggaggagagctgtgtggctccacatccttgctcataactgtcagtgtcaagcttttcaatctggtgtgtatgaaatcatatttcactgtgattaaaatgtgaatgttctggactaacaaagttgagcatcttttcggatgtttattcaggttttcacttctatgaagtatcttttcaagtgttctgcacatttgtttttctctgttgagtttcttggattttttcttattgactcataaagcatctctcatatgctttggatgtaggtatttgtcagttatatttttaaatgcctaaattggatgcagcattccctaacttcaagtctgtcttattttctaaagtaaatatttaagaccatttcttcttaagtcttaactacatcttacaagctttgatacctaatatatttgctataatctacttgttaatacagtctgatttccattatttctcctttgatccatgaattgtttagaagtatgtttttgtatctataaaaaaaggagtattccttgtaactttttgattatttatttaaactacattgcattataatcaaagaatatgttcagcatgataccaatacttcaaaatttgataagattagctttattactaaaatgtggttaggttttacgaatgcccacatgtacttcgacatgtatattctccactcaatcaaaatagtacattgcacttttcaactattatatgtctttactgttggcctacaatcacaagagtctgatttgtccattattaatgaacactttcagtttttatattcaagcatttggtttgatccaggtttatttttatataaagtgtgaaactaagttcaggctgtttttttccccagattccagttgtaacaatagtttttattgaataattatctttttcattaccaatttgttttgtcaagtttgctacataccaaattgtcttatttttatttacttatggatttttattttatttcattaatctattcatgcaagaatgggacatttttattaggtgacagtaatgaaaatttaaactaggttttgatgcagtgatatactgatggacccaaggtagaaaattaaactagatttagaagagagaatttagaaaaatgaatagggtcatggtcttttttgtctaaaggagagtgtgtgaataataagtggaaatgaaaaacctcagcagagggaagtacacattgttaacaattattcagacccatgtaacaaaagaccgtaattctctgctctgtaaaagaattatattaaagagacaaatgtcacactaaatgatacttgcaggacttacacaggtctctagagaaaagagtgagtataattagtacatgtgttatgatgttttgattctagtccaaaccaactagattaaatacatttactttttgaacaaaaatggcaagacataattattacaattggaatgtgatagtaatatatataatatgtatatcttagtgtgtgtgtatttatatatgtatgtatgcattccttgtgcctaaaacacttcctgctaggaaattaagccagccttctatatttgtactcacaatctatcctccaagatatgtagagttgataaaaattaatgcttgcctacaaaatttcagcaatgcttctcctatctctgtacctcccctctgtatacatttgaaaaattaatcctgaccatcccaggaggtagaaaggaaagggtggtaaaataaatagttccttgagattttataaattcatccagattaaaatatatatatatatgtatatgcacacttgtcttgaaaaagttgtgatgatgttatatatcagaaataaaaaattgtttccactcatccaaaagtttaggactcacaaatttttttcaagcagaaataattttgtttcataaatttggtttaatttcttttgattacataaaaaactagaaatggaaatttatgtatatagcaatgtaaaaatgatagtgagtttaatgctaaaatctgatctactgggctctgtttaacctaatacccaaagcttaagtaatggttaagttggggtttagaggggcctattaccttcttcagggcattggtattttgtttcctaccttaatctaaaattagtgtcttatttgccagtctaatatattttacaatcaatctacattgcctaccttttggagtatttctatttaaataaaacaaaatgagcgtttaaactgggaacgtattagattcttctgagctattgagcagtatcagatccttcagcaagaaagctgttttatcatttactaagtacctaggcacagcatcaccttgcccgttaaaagccctgtcaggtacacattttggttgctaggcagctgctggggaagcaatctcttccacacatatggtttatgccacctggcctgcatttcacaccaacctccccaaacttcccagggagttgcaagagaggtcctcatgttcctgtcttcactttccatttccctgtcataagcactccatttgttgtcagctttcattaaggacatttccaggagctaaatatggtagatttctattaactgattctaaagattcacattaaacagaaatagagcaaaaccataaagccatctgtggaatttgagagtatggaggggaatatattaagattaaaagataatcccggttacacttccattttcatgacatttgataaaaacactttggaggaaggagaagaaatgggccagtgagagggaggaagaagaaagagacctggaaaggaaaaaaggcaggaaggcagatggaaggagaggtacagaaggatgaatggaaggaggaaatgcaattttttttcttcctttttattttattttattttattattatgatactttaagttgtagggtacatgtgcacaatgtacaggttagttacatatgtatacatgtgccatgctggtgtgctgcacccattaactcatcatttagcattaggtatatctcctaatgctatccctcccccctccccctaccccacaatagtccccagagtgtgatgttccccttcctgtgtccatgtgttctcattgttcaattcccacctatgagtgagaacatgcggtgtttggttttttgtccttgcgacagtttactgagaatgatgatttccaatttcatccatgtccccaaaaaggacatgaactcatcattttttatggctgcatagcattccatggtgtatatgtgccacattttcttaatccagtctatcattgttggacatttgggttggttccaagtctttgctattgtgaataatgccgcaataaacatacgtgtgcatgtgtctttatagcagcatgatttatattcctttgggtatatacccagtaatgggatggctgggtcaaatggtatttctagttctagatccctgagaaatcgccacactgacttccacaatggttgaactagtttacagtcccaccaacagtgtaaaaatgttcctatttctccacatcctctccagcacctgttgtttcctgactgtttaatgattgccattctaactggtgtgagatggtatctcattgtggttttgatttacatttctctgatggccagtgatggtgagcattttttcatgtgttttttggctgcataaatgtcttcttttgagaagtgtctgttcgtgtccttcacccactttttgatggggttgtttgtttttttcttgtaaatttgtttgagttcattgtagattctggatattagccctttgtcagatgagtaggttgcggaaattttctcccattttgtaggttgcctgttcactctgatggtagtttcttttgctgtgcagaagctctttagtttaattagatccgatttgtcaattttgtcttttgttgacattgcttttggtgttttagacatgaagtccttgcccatgcctatgtcctgaatggtaatgcctaggttttcttctcgggtttttatggttttacgtctaacgtttaggtctttaatccatcttgaattaatttttgtataaggtgtaaggaaggcatcatctttgagatgaatgtgaatgatcgtggaatattccttctgtgacagactttatttttgagacaggatctcactctgtcatccatgctgctgtgcagtggtgcaatcacagctcagtgcagccttgaactcctgggctcaaggaacactcctagcctccccagcagctgggactacaggtacaggcgctgccatgcccggttattctggcttcaagcaattctcccacctcagcctcccaaagtgctggacttacaggcaggagccactgcgcccccggcccttgtgacagacttttaatgaaaccattatatttacttctttgacagcctgttactatgtcaattcctccagccactacaaaacctgtcctcatggtttagagcattggcagtcactccctaaaattggagtggagtgaggaaggcagttctgtaggaggggcttatggactccttaagggcataggctgttggagtccctgctgagagatctctgccctaccttgtggaactggagtgaaacaacgggggcgttgcttccagccatctgggagagaggatccagagcttcccctcagagagctgggatgttgtcagcaggcatcagacagagcaaaaagccatttttctttattctattcctgatacaaagcaactgagatatgcgtttctctttggaattgaggaagggagaataatggagcttttgcggtgatggacagggaaaaagtgggggagcagttaattatccatcttgacaggtgtagacacaggctgggaagctgggtgtgtcttaatccctgctcctgaaccaccgtggggagcaggaagcctacagtttccttatatcagcaaatgcatcatgttgaaacaattttactgcttgctttctgaatttaaatatagattttccctgagaagggctcaagcatgcagatggtaagaaaaacaacagtctagaaagatatcttcaagttccttctcctggttggtggaaatagagcaattcttttccaaaatataatttttagagttttaaagtaaaaaaaaaaaaaaaaaaaaggatagagtcaatttggaatttcttagctgaccattctattagagcataggtttttcagaaaatagagtttatgggcaaaaaaaaaaaaaaaaaaaaaaaaggaaagaaaactgttttaagtatgatatcttcagtgtaatatatagttaacatatactattttgttgtaattagaatatgcaattattatatattaaacatatctacatctgtagtaaaatgtgttgtcctacatttcagaaaactataaggcttttgggaaagaaaatttaggagtatacattaaaagccatgtcaatgccattccctttaacatagtagttccatttctaagggaaagaagttaaaaaattgaataaactcacatgcatgaaaatgtttcaattataatcatgaaaaaggaaataatataagtaaccaggatagaggattgattagggtagttgctctcaattttgccccccagtggacatttggcaaaggacagcgcccctacaacagagttatccagcccaaaatgtgagtagctccaaggttcataaactgtacattagtgtaattagagtgtactgactcaacagaagaatgtgcagtctttaaagctcatattataaaggctaagcttcaacatgaaaaattattttgatataataaaagagaaaataacaggatgctatttcatatatacattattatggtcaaaggtagttttaccatgatgctggtgaaactttagttgcaggatctctcacttacggaagcccttcaaaggcccttacggaggctgtaactgtgtttcatatggttataggcttttgtataaatttttaaactaagattattttaattttattttaatataatatttttctttttccctcctgaagttatacaagtttcaggcaccactaaacttgatttccctttgactatcattttaaggaaatgaaacttaatgcacatgatggaggaaaaagaatgtgatgagaaattaccaaatagctaactgaagtcatgtaaggatgaggggataatggagaaacatttttctcttctctagtttccaggtgttttccagagctattatattagtttataatgaaagaaatgattcttaagagaaagaaagttcatggatatacaagaagaaaaaaaaatttggaaaaaaaccaccatgttaggcgccggatgagtttgttgtggtttgagttttgatcttctcatgctgatctttccggctttgtagttctctctcctctcgtacttctccatcattcatgcttgtgtccaaccacagtattttactaagagagcatgtgttctagtgccctattgctgcagagcaaaccacccaaaaaacctacataggctctgctgggtggttctcactgggggcctctcaaacagttgcagcaagatggtggttgaagctgaagtcatctgaaggctcactgggctagacatcccaggtgatcatcactcaccggccccatatctccgtgctcctatctgtagcatctcctgacagcagagtagccaggtcttcctacatggccacttggtactacaaaaggcaagaagaaagtgccagtcctcttaacaactagatcgagaactgagagagaatccattttaccatattcagtggttcaacacaatcccaagccagcacagattaaaggggatgcaagggtagactcctttgctgcatgggggaatatcatacagtgcggcaaaggaagggcttgatggaagcctttgaacacaagctaccacagcaaagaacatttgatttccaagattcccataaggtagggagggatatgcaatatagagcaagcatcttccctagaaatatgcatgtgataaaaatatctacctacagagatattgttagcagtggaagttattcaagttagtaatggcaaattcatacgggtctgcagcaacctcaattcttgcttcctcagaagaaagaatttgactgaggggcataaggcagaagacgagatagaggcaagttttagagtaggagtgaaagtttattaaaaagctttagagcagaaatgaaaagaaagtaaagtacacttggaagagggtcatgtggacatcttggaggtcaagtgcactgtttgatcccggacttacagtttttacatgctgtcctacttcctgcatcttttgtcccttttccggtggaatgccctccgaaggtcatataccagttaaactttgccattttgcctcttaatgtacatgtgtgagctcactcgcccaactcctgagatctcatgaggaagctgcgcatcaccagtttcaggtatttcctatctatatagggagactgcctttccctggtgctggctgtgaccaattattattttagagagacagttaacagccacctgcccagggtcacctgactttcttggtggggtgtgcggggagccctttcctgccccgctcatgcctgactagctacctactgtaacaccatgtgtaacaccatgaacacaaaatgaatatttctgacaatcagctatagagtgtaaaagcttttaagtagcactttgccagttagaatgctctaaaatggagcctcctaaaattctccaatataataattttctacggaaatctatcagaatagagcagtgacacccagaggaaatttggaaatgtttagtagtatagtgttttatgcattttaaaataaacaataactaatattttaattggaattttttgagaaaagatacaagctactttcaactgaagaaaagtgtcccgagctaaaaagactacctttgcatcatcatagactgcttgatagaacaactaaggaagtaaatgaaacggaactcactagaggccacctgaatcatcaacaaattagtcaatcagaaatgttgactagagtccctctttgatgaataacaaaattcttattctgtttccaaatgtaagaataaatgaccagggctgttatttgctctaggggattaatattctgtacattcagttaatcttgcttgtgattaatcagcaaatagtcaagacaattgaaatattcacatatcttatgaaataaagagatatttgcaaatatcaacaaaaaaggacattatgtaaaaaattcacttattagaagcatgtcagtaggccacaaattaactaaccctaagcattattttgctttctttgtagcacattccccttatatggtactcttttctgggaaacatggtcttgctctgttgcccaggctggagtgcagtgttgcaaccatggctcactgcaggctcaagctcctgggctcaaatgatcctcccacctcaaaagcttttctagtagctaggaccacaggttatgccacacctggctaatttttaaaaaatgttttgtagaaatggagtctccctatgttgcccacccttgtcttgagctcctgggcttaagtgatcctcctgccttgggctactaaagtgttgggattacaggtatgagccactgtgcccagctgataaggtactcttttatgtcagacatattaaacaaccctatttattgatatcaaagtacaatgcaccaattctgtgaccagaaaatgagacaataaataaaaactatcttaaactttctattccccattttatttttacagctaacttttttttttttttttgagatggagtcccactgtgtcacccaggctggagtgcaatggtgccatctctgctcactgcaacctctgcctcccgggttcaagtggttctcctgcctcagccttctgagtagctgggattacaggcgcctgccaccacgccagctaatttttgtattttcagtagagacagggtttcactgtctcaggctggtcctgaactcctgacctcaggatccacccgcctcagactctcaaagtgctggggttacaggcatgagccactgtgcctggcctacagctaactccttaactacccctctccttaaaaaagtaatcaaatattttcatcgtgcccttaattctcattttcagtttgtcatagctgtagaataaatggaacttaggattaatacagaacaatttcttcagttacttactctatatgacaaatggaaccagttatatgaatgctaagacctagtatcttgaagactctcaagtaaaaaaatgctctggggaaaataatttaaaaccatttgtctctggttttgacacacttcaaacaaacttgtacaatatattttcccaacctgaacatattcattcattcaaggacagatcagtcacccaatggacatatatttagcaatgattctatgtgtaatcatgattctgggaacatagaattaaagatgattaacaagttaaaacgtctccctttgaggtcgggaaatattcacctgactttactgttatactgttttatcccccagtgcctaatattatgcttggaacagggtagatacttgcctcttttctttattttctttctttctttctttctttctttctttctttctttctttctttctttctttctttctttctttctttttctttttccttccttccttcctttcttttcctttcccttcctttcttctttctcttttttctgtcctctttccttccttctttccttccttccttccttcctttctctcttccatttgttgttctttgtttttttgttatttaaataagtaacattaataaaacacactggtggaaataaacagaagtgagaacataaacagcttaggtgactgggatttaagcatatggctttctatgtcttagcaaccctcatgtggttggaggttgtcagtcttattccccatttgacctccagcattagcccagaggctggacaaaagaagtaatcaattaataattgatatcaaaataaatgattcagtgtcttttcaacataggacaacacagtcagtgaggctaacaagaatgatatcaatttttcaagatgttaaatgctacacattatactatactaaagaaaaaagaaagtttgcatcacttttttttcatttatctggaaaatttatttatattgaagttctcatttagttttggtgcctgatgaatgagctattacttgatattctcttgctttctcaataaccatctcatctagaaagcagggtgggacttctcttttttttacttttctgacgtggtgaagcgtctatcagaacatctttcctctcattggcagctcactacgcagcttgcaaaggttcacaggtggctgaaacccaacccagttgtaaatcacaacatgggtacatcttgcatattttagaagacagaaaagaaaataccttgtcagccagcaatcagaagcacattatatctcagaaagtctgccccttgtgcctgtcagcctgaatgggacctttcacacaaaccttcctgccaattcacttagagcagccagacaactccctccctcccatctttcaaattactccacatgtctaagttttcctttaaaatgtttccaaaccactggagcacacctctcatcacagacccccattgatgagagacaggattaaggttatgtcagatataactgatgattagagttatttccaccttctccacagttgttgacagacagcaaataaaggcaacattgttagacctacaattgatctattgaagttaggacttatttcttgactcctgaaaatacaaccttctaccagggctattctaagccagtgatttagagccctgatgccctgtatttatttattttttttactaatttttccactgctatgcaatgaggcatatcattattattattgtaaccgcctggctctcagtggcatgtgcacaaacacccagaaagtaaaggcatacagaagcctccgttaacgttgagaagggacagacaccataattgttttccactgttccttccattttaaacagtggggatcttacctatgttaagcatttctaggtgaagcatagactgcttaagagctgtatgagtagaaattaggaatttaggcttcagatccaaccccacctgggttggtatttgggtttcaacatatagtagctttgtaactgctggtgtgccactaatgctctccaaatattaaggaaggctttgaatgctattccaagatgtttaggctttcttccacaggcagaagagagcctttgaaagccttggagcagatgagtaacatagtagaaaaaaatacttcgagataacttgcaaagaggagttgtcaatctccaggatttgctcagctccattctccttctgggcacatggaagttctctgtgtctggcactgcattggttctccaaatctcacaaacagtgcactgaatgactgtgatgattgaataattgaccaagaaacccagataatgaaaggaagaaagagaaagaaagaaagaaagaaagaaagaaagaaagaaagaaagaaaggaaggaagatagtaatgaaatgtgggcatggttgactaatgtatgagagttcatcagatgtataacttacttttcttttgaataatttgtatttatttattgagcattacctggataaaatacataactagttccatgcttcacttaatggtttaattatcaagaagttttgaatcaatactgacctgcaagcaatgtctcaaatctggaagctaccaagaattctgagatccaagttttctttcaaacttccctcccttttgcattttgaagtggtagtacaatttggatcagataaagaggaacaaggtggtttcagctagctgcagaacacagatatgacttcattacccagctgttagtaattttcctcccagtcggaggcagaattttgaatagactgaaaacatgtttgtgcagggttctaagatgctacatgaattcagatgttcattcatttaattcatataatagcctcagatgatatctttctttctcaccacaaggctatgctttgtctaaatggccaggtaaacatcccagaagtgagtggtccctgaagtggtccgtgaaccgatttccacgaccggttctttcctacgtgtgaaccgtgctctgctgcaatctactagtgcctcgggcattcctgcggcctttgtctaagcagaaagggtagaacttcctgaacactaataaaggaaacataaaagcagaggtcagctggaagattggcaataggctaatgaaactgacagtcatttttgaccattttaaacaataagtttgttgcccctacatcctccacattagctgcccagtcttgtcaagtgacacacgggatattatgttgaatttttaaggtgcttcttggctgtgaatatggcctgggatctttctttccttttaataatacttagcacataattgttctgaaatcacatgttggaaaagctcttgactagaaatgttgagagcgggggagaaaaagaacagcacttaagaaaagaatggaaaagtttcagtgacatttgcaaaattgcttttccttctgatttggttgggaaaattatttttcagactctagggaattattgtttctcacacacttcatataagaatatatttcaagccagaaaggaccttagaggtggtgctcagtgtccttcgttcagatcagggaaggaaactgaagccgagggacgttaattgaattgcctctgttgtggctgcaaagtcagccagtgaaaacaaaaattctctaggaagccagctttgtttccttatatttaaaagtcattcactcatgtattcatttggccacagactatgtattgcacagctattaatattatgtggcaggccatatcaaggcatggagaatacagtggtaaacagaacagatcaaacctctgcccttatgttggtgataaatgctctagcaccttggtaatcaaaatacctccgtattagcagtttatcggaaatgcagaatctcaggccccaccccagatctattggatcagaatatcctttaaacaacatcctcctggagtttcatatgcattttcaagttgagaagaaatagataaaaaaataagtaaaataaggaaaataggaagagtttggggagcttaatgggagattatgtaagagagatatgtggaggtcaaatgcccagggctctgtgggttatttgaaggacgtgggcttttgctctgagtggggtggcaaaactggagaggattttgagacaaggcatggtgtaatgtgactaagtataaattctatgtagcacagccttaaatgttagagaggtagaaaacagatcagtggcggcctggcaacaggggataggccacaaaagggcacaagaaacttttaagggtaatagaaatattctgtaccttgatggtaatggaattacactcatgtatatatttgtcaaaactcatctattggtgcacttagaatgaatgcatttcgttatttgtaaactacttccaaagagttccaaaaaaaaaaaaaaacctgttggacacatctgatacggtttggctgtgccgtcacccaaatcatcttgaattgtagctcccgtaatccctgtgtgtcatgggagggaccttgggggtggtgattagattatgggggcagttcccccatgctgttctcgtgatagtgagtgacttctcacaagatctgatggttttaataagggggctcattctcattctcgctcctgctgcactgtgaagagggaccttccaccatgattgtaagtttcctgaggcctccccagccatacagaaatgtgagtcaattaaacctctttcctttataaattactcagtcttgggtattcttcatagcagtgtgagaatggactaatatacaacatcataaccaggatataacttaaattgtgtaaaagaaataagcaggatcacctccttatgtgggtactatgctcacaacctgggtgacaggttcaatcacaccccaaacctcagcatcacgcagtatacctctgtaacaaacctgcagatgtacctcgggttctaaagtaaaagttgaaaatttaaaaaaaaggcagatgagagaacagctgttgcaaagagtatcagttgaaaccaaatttctctctaagccagaagaatagtgggtatgtgagcatgtgcaagattttgcactgcaaaagatcatttcaggagtccagaacacttgagaatatgcagaataacagtggagaattcaaagtgataccgaaatgcaaaagcacactaggtcaggatttatgagatagattctatttttgcctcacttctactactgcctaactttgtgaccttggacaagtcatgtattgttcttgggaatacaattttcttctctttcaagtggcaatcagagcacctgtttccacattgctatgtgggggtcaagtgcaatgtgaatgctggaaaagtgctttgaaaatgagaaggcactgcgtatgtgtaaggactgctaaaatggccttttccaagatgcattcacatcagtgacgccaagaagttggaaaggacaccaattattagatgtttctgacactgccttaacttcagggcatgtgcaagttttcctgatgtgcatgtgaaactgtgtctattacatatgctgaagttttcccccaaatgggaccagcacccacatgtctgatatattccttaggtagagccattcttctcaataaaacacaaaatagtgaaatacagaaatgtctgatttgtaaagagagggtatctgtaacaaaattgaaagtcacagatttgatatctacttttacattcttgtatccagtaacatttttttgagcatctgctactgagtgaagcatggaaggatacacaaagatgaataaaacacagtctttattgtcaaggagatgacagtctagaagaatggataagatgtgtctaaaagtaacttgaatgcaaagccatatgtggaaactataagacaaaaattaacgcaatggagttagatagggggaaaaataaacacttgtctctcggaaaccttcctgagaaaagtggtgtttgaagtgagcattaagaatagattaagtcatgtcatagaatcaggaaaatacaaggcatttctggaatgatgtggtggcctgtttggctgggagacagcttatgtttggggcactagtgtgatatggaagaggaggctaaagaaggttaattgaagacaggaccatggaaggttttccatgctagcctttctaggctggaaatggaaaaccactggaggtttctgagcagaagcgtcgtatgactcaaagtgtgtcagcggaagaggactttggcagctctgttgagtatgcactaatgttgggacagaccagtggtaggaaggccaattaaaaactaaatgcaatgatttaggggagagaaaatgaggatttcaactagtgtagtagattataggtttggacagatatgaatgaatataaataacattgtatcaaaaaattggctggaccttaaaaccatctggatgtgggaggtgagaaagaagaaagtaccaaggatgactctcaaattcccagccaaagtaaaaagccctgaaagagtgcatgggtgaaagatagtggatgtatttttaagacatgctgacttagtggtgctagtggaacagctaacattattatttcttctatacggcacacatttaccatatgttattctatttaataatcaaaacaggcttgtgagaagagtaagatcataccagttttacatagagggattaaggctaaagagaagtaacttgcttaaggtggcagaatcaccattggagaagaaacataaatattgtgttctttgtatgccatcattgcaaaaatctagcagattgttgaacataagaaactgaaattcttggctgggcgcggtggctcatgcctgtaatcccagcactttgggaggccgaggcggacggatcacgaggtcaggagtttgagaccagcctggccaatatggtgaaaccccgtctctaataaaaatacaaaaattagctgggcatggtggcgtatcctgtagtcccagttatttgggaagctgaggcaggagaattgcttgaacccaggaggcggaggttgcagtgagctgagatcgcgccactgactccagcctggatgacaagaacaagactctatctcaaaaaaaaaaaaaaaaaaaaaaaaagaaagaaactgaaatttgtgatttcctggtccagtgatcatttctaattgataccaatgaatccctctgatgaatatttcactggtatttttctaatatatgatacattcataagttggttcctaagctgtattttaagagaacatcatgatttagatttttcttatactaccaagaatgccactctgattctttatggaaactgagaccatacacttaagctctaggggggaggtaatgtaatgcaacctgtgtttctaaagcacaatcacactataaacagaccttgctgcaaaaataagtatattcagcacagagctgataaacctcagatctgtggctgaaatgatcagttgatgatattatagtaaacaccattaccaatgttgtgttctggatgtttttcttcaagctgtgtgtctgtaggaaatgactagtatcataaaccctcttgacaaaaaaaaaaaaatcacatttctgttttccaaaaagagttttttttaatatcataataaatgagttcttttgaattcatctgtgcttttctaaatattatcttctggcaatgactttgccttatctctgctctgctgtttctggagagcataattttgctacatgtatctgaagatttataattgcgcctcttaattggaaatcaaggcttggcattagttaacagttactggtgaaatggcccactgataaaaacaaatgcttacatttctagaataataacaggaattcttctctgaagaacccagagtggcagactatcacttcacaaaactttctcatttccccaaacttgtaataaagccagctcattgtttcttcaggctactaagcatcaagcaatttgttttctgtgttcagtctgtcatcttacggctcgctctaatgttcactgaagccctacggcagactttgggactactgtttttttaaataaacaattatggcattttcagatatggatattatcaaaggaatgatctaattgtccaccacagatttggatcagatagttattcctcataatacctcaagctgagactcaggaaactagtcctgcgtggggacatatgtcaaatgcattacaaaagcatcacctccttagtctaaataacgtcaccaccacccacccagttatgcaagcaaggaacttagacagtatcctttttacctccctcttcctcattgcccatatctaacccgttctatgttctgaaatagtacttctggattcattctgtcctgttgtatttttggatccatccatttttctctttctcaactaccccacttgtcagtccaccttgacattccacagtggcctcctcactgttctctccatccttcattcatgctcctctccagtgttttctccacctacattgagagcaatgtttccagattaactagtatatcaagtgagtcctaggtttaaaaacctgcaatcactttcattgcttttagtataaatatcaaaatccttatgcaggaccttgaaggctctacatgctctagccccactcacttctacagaccatttgttctaagtctcctcttctctgggaggaagagatcccctctactgagaatgcttctcttctcccatctcttcccttagttatacttttcctccaccttcatatctcaagtgctagttcctcagagaagccttcctcaccacccacacactcctggtccagggacctcccttcctaccttcctccctcccttcctccctttcttcctcccttcccttcttccttccttttctttttttccattctctccttctttctttctctctttctctttttttcctttctcaccattagctttctttcttcccattttctttccttccttccttccttccttccctccctcccctcttcctctttttcacccttccttccttctttcattttttctttctttctttgtttttctttcgtcttccttccttccatcattttttctttctctttgtttctttctttcttttgtctctctccttctttccttccttcctcccttcccttcccttcccctccctccccttctttctttccttccttttcttctttcatcctgttttcattaatttgttctttctttccatcatctatctttctatccttccttcctttcttacttcctccctccctccctctctctctttcttttcttctttctttttcttctattatctactatctatgtttttgtctattatctatccatctattcatctatctgtctatctctatatgtatatattcaatagaaccaaatctctgtatttcagatcacttatttctacttataatcttatatttattcatatctacagtcttaactctaggctgtaagctccgtgagaacagtggttgtatttggtattacttaattttatgttccatgttctcaagcctaactttgtgtctgacacaggtgagctttcaataaatattagtagaataagttaaagtgctttactgagctctgaatgttgatcaagaagtaaccactgcgaaatattggatgccaagaaaataagctatttaacatttcccagcaaatgattttcagtgaagcagtgaggatgggaaagacacaatccctgaagactgaaagaaatttaaaaagaaaatgggaaggcaaatgaaaagcacataaaacaaatacctaatacatgcagggcttaaaacctagatgatgggttgataggtgcagcaaaccaccatggcacatgtatacctatgtaacaagcctgcatgttctgcacatgtatcctagaacttaaagtaaaattttaaagaagaataaccagaaaataaataaataaatatatatttttttaaaacctgctttgtcaggtactgttacagttgatatagatgaagtgaaatctaagaagaatgtctaggcccaagatgcctagtgcttgcttttaactattttcattttttagccaattactaattaacagaggactagttcaggactcattggaatgtccaggtggctaagggactgcacagtgtttgcttttgattacaaaaacaagccctagctcatgcacttcctgataagtttggttctgtgtccccacccaaatctcaccttgaattgtaatgatccccatgtgttgagggcaggaccaggtggagataaatgaatcatgggggcagtttccctcatgttgttctcgtgatagcgaacgaattctcatgaggtctatgtttttgtttttgttttttgagacagagtctcccctgtcacccaggctggagtgcagtggtgcaatctcggctcactgcaacttctgcttcctgggctcaagtgtagctgggactacaggtgtgaatcaccaatgcctggctaacttttgtatttttgtagagacaaggttttgccatgttgcccaggctggtgtcaaactcctgagctcaaagcaatctgcctgcatggacctcccaaagtgctgagattacaggcatgagccaccacacccgcggagatctgatggttttataaggtgcatccccctacctttggcactcattctttctcctgctgccctgtgaagaggtgacttctgccatgattgtaagtttcctgaggcctttggctggattttggacttgcatggggcctgtagccccttcattttggccaatttctcccacttggaacaggtatatttaccccatgcctgtacccctattgtatgtaggaagtaagtaacttgcttttgactttacaggctcatacgtggaagggacttgccttatttcagatgagagtttggacttggacttttgggttaatgctggaatgagttaagactttgggggactgttggaagggtatgattgtgttttgaaatgtgaggacatgagattttggaggggccagggatagagtaatatggtttagctctgtgttccccccacccaaatctcaccatgaattgtaataatccccatgtgtcaaggacaggaccaggtggatataattgaatcataggggtggcttcccccgtgttgttctcacggtagtgagtgagttctcatgagatctgatggtcatataaagggcttcccccttccctcggctctcattctctcttctgtcaccctgtgaagaggtgccttccaccatgattgtaagtttcctgaggcctccccagccatgcagaactgtcagtcaattaagcctcttttctttataaattgcccgatctcaggtatttcttcatagcagcataagaatggacttacatacttccccaagacctcttcattgctgggccatcacagtaccctgaatatgttcttaaaatcaaactttaaaccagttagttgcttttaagctttttctatggtgtcttgtgcaccttacatcaaattcaccatgtataatgaattaaaaagtataactcctagcaacaactcctaaagagtttggagacttcttctggtggcatctctcttgctcttgtaccctctctctctttttctctattcctctccccaagtgtctgaataataaaatttctatcaggagtggattaaaagatacatctatcagttcaccaatttagattctataacaggaatgacaggcattaagacattgtatccaataatgtctgggctaacttttttgttgtcgttctcacatcctttccactgattaacacaaataattgaattaagtataatttcataagacatgaatgactgcatttcatcataaatcactcataaattcttttgctaaattgttggttttcaatttaggataactgaaggataggaattttaccttcaggttagctataaccaaaaatatgaggaaaaaaaacatgatctctgccagaagatcactggaagagatttagtgtgagatcttccatggaaagatcagagcaatacagactggctcaaagagagcacatagcctcagacttttattctaatgtataagaaatggtttttatgtactttgtgttcattgatacttattttctttcttggcttcagccaaaatatgaatgtaccctcagctttcctttttcatggcaatcattgattctaaaggcctggcacagatatgttcttcgaagggtgtgacctttaccgtcctgtgcgcatcagctatctccccatcccatacctgcatccctttaccagagggctttctctggtagactgtccttttgcatgctggagagtgagctcttccagaggcagccctcaaaccatgatctatgggagctgacagatcctcagttgtgtcatcccttaggtgacaaactgcaccatccctggagcatctcatggtgaagtcctggttcccacagtggtagcttgctcaacagtgcagcccttattggctcttttccatcctctttcttgctttcccactcttctacccgtattttctctgatcacctcccaaataaactatttctctagaactcttgtctcaggcttaaattttttctgcaaaagggaatgcctttggatttctgtaaaagggtctgcttcaaggagaaatgcaacctgagagagaaggtcatggttttcacaaaaggctgtggttacaatgagatttgaggcttaaatccaggcttgtgtaagactgttatgtgttactagttgttaaaatattgagtgcttttatgcttgtttgcaaatagctacttctcccaactctgcagtggtcatgaccacttcatggtcatccattccttcccatgattcaacaactaaagtttattacttgccacaacaggggcttctaagaccctcattaaatgctatgggcaccaactgtttgaatgattggtgtgcttgctatgtgaattattaaatattttaaatattatttatgtttaatgtggtgcccaccagacccagatgtaacgtacagcttttccttggacagtatagagaagaccttgaagttatgttcttttaactcagtctttagtatttctctgcatgaaatccttcagctccatgtccagttgcaccgtggtagatttgcagggaagtggatggatgaaagagacaggagaaggaagagaggacagaacaatcaatacttgatgatgaacttctgggaaactgcgagcatttccatttgaaacaaatagagtgtttcttatacaatagccatatgtatttgtaaacaataaaatgcctgctagtgtacaatggattgcacttctctgatattatacttatattcttggctctgctttttttctggattcaaaatattcataagaaatgaaatatggaaccaaaagtcacacatacatacacacacagatacattttatagtagatacttgctgcttggcccagatatgttttgtggattaaattctaggccccatgctggatgccagactcactacccatgtttagacccctagacatcagacatttactgcctggccctgtgctcccagctgcccatccaggtggtaagttttatatctcgaaaagctttttcaggctgatttcatggtgaatatgtgttaatcacctcagggagttattgagaatttgggataaacttgattgggtgaacaagcagcatgtgtccaaatatagctattcctgagctgtatctttgatatatttgatgatgcttgaaaacagtccgatttacatccatcgctgcattataaagaacagggctgaagatttataagttgaattttgttgcaaatgccaaagcatgggccacagataaatcagttaccagaataagggtgattttataacctgcatgtgttttatagtttctcatgacacaataatcataaaattcaaaaggcacactcttgcaagtgtgaaaaggcaatttcagggttccttttggtttctgctattgcaaggcaggatatagatacagtttctcactatttagatttgctattgaagttttagtggagtgccaaagatttcagtcagcaagtgtcagtaaatgatatcaacacagctccaagttcaaggtggaatcgtttcttgaaataaagtgagcatttggtgcccagaaatcttgttttaaaatacaccaacttctcagttttggaagagctctttattttttaaaaatagattcttattatgtaagcatacaacttttcttgtatgttcctgttgctcgtatttgtacacatacacagtgaaagttatttttaaatcttttattcttatctgtaactgctgacagcatttgaggtgtggaaacttttaagactgaaaaatcaagtaaaggaaaattcaagcaaatgaatacagaaaaacattatcattaggagccttaataaaactgctgtttagcttgtcacgctggcacattcctgtaatcctagcactttgggaggctgaggcgggtggatcacttgaaatcaggggttcaagaccatcctagccaacgtggtgaaaccctgtctctactaaaaatcaaaacaattagctgggcatggtggtacatgcctgtagtcccagctacttgggaggctgaggcagaataatcatttgaacctagcaagcagaggttgcagtgagccgagattgcactactgttctccagcctgggcaacagagcaagactccatctcaaaaacaacagcaaaactgctgtttaactccacaaaagtcattacaccactatacattcactaaaattgctaaaattaaggaaaaaaaaaaaacagtagtaaggccaggtgttggcaagattgtagaatagctgaaactctcatacaggggtgatataaaatggtacaactactttggaaaactctctggcagtttctaataaagttaaatatgtacttacctctcctatggcctaacaattccattcctaggtatttacccaaaagagatgaaacatatatccatataacaacttgtaaaagaatgcttatagcccctttattcataaaaaccccaaactggaaacaacccaaatttccaccaactggtaaatgaataaacacattgcggtataatcacataatggaatactactcagctataaataaaaatgaattgctaatgcattcagtctagtgatgaatctcaaaattatagtgtttttgaagagagctgaagagacacaaaatggaccatactctacacttccatttatattaagtttaaagacaaggaaatattctgcagtgatagaaaccagaatagtagctgattgtagagtacaagaggactgattggaaaggagaacattccagagagaggaagtgtattataccttagcctggatgatgattgcatggtcatatacacttgccaaattgcattgatccatatgtttatgatttgcattatttgtatataaattatacctcaataaaatgctgttaacataaaaaaattgcccagcttctgagttcttgcttaataatattagtatcacctgttgctgttctacgttaactcaggagctaaattcaaattcagtgtatgacaaaatcttatttgtgtgaaattactgggacgtgtacttttgcatttaagaaaatgctccaaaaaactgaagattctcccttcatgttagaaacttaaaaataaaataaaataaaataaagatttttttgggaggaagggaatcttaagttaaaatgtcacaaatctctcctatcatgttagtcacttttttcttgacttggcatttgcttggttgccttaagcctttgtctatttttcagagttctgacagagttgagtttgataatttttgctggttttatcagtgttttcgtggagaaatgggcccttggggctccctactctgctgtttttgctgacttcaccaccaaccctcatattcttaactctgtatccttaatagggttgaatgggtttcaaaaggcaaggtaggcaatggatcatgatactaagtcaatgataggagctttgaagtgaaagaggtgtttctaacaaaaagtagatacacactctccacctacactcctcttcctccatcatatcatacaattcagaagcaagaagaaaacacaaactcatagactgaggccatccaccactacctgaaatgctgcacctcactcaacatgggatggggcttcgattgttatgatttaagcacttctgaaaacacactttctacttcctgtttggtcttaagtcttccctggaaaggtcatctatctccatgtatttcctataaatatctacctctcttattaagtgttacattcaaatgtgacaaattaaaatcaagtggaaatattttgtgttaatgataaggtaaagccaactgtgtatgtcagagtagaatatggcatgtgctcttatcataaatattacaggagctatttgtttgtcagggcttcatcaaaacatctgaaaattgcttgacttggaggagaatagactataatttccatgtctgccccaaataatcagtcattgacaacttagaaaattcttatcaataaagatggaatcaattttttctattccacaaaatgtaagcatatcattttgagacaaattttaaaatcgttttagacttgacaaattacatgaaagagacacttagtcagaaatgattttttttaatgaagtgaaatttaataagtgactctgaatgtctgttgatgtgttgggaagcccatctttgcttgaccaaagatttatccagtaataatcaaaacatctaagttagtcttagaatttatatatatttcccatcctggctaacaccctcctcagcatggcagcagtaggaaagatggcggccacattctctctatgggtacctgattctggaaggagcagagcagaccttattaccaaagaattgtgtttgtctgttttgacctgaagagtccctaaaagtacttgccttcgttttacctaacttggaactctcttagggcagaaaagcagccatgtagaggacattcctccaaaacatagaaaggtaaatgaacaagcctctgccacttagggcaaaagatgatagttgttataaacaatagacaaccctaaatactggaaggaaaagctggagaatgagttactttagagaataattgctttgaaaaagattccttataatagaaaacctaaaaagtgatgcatatgcccaggataggacctatgctcaaaagatttgagaagacactaagctttcaccttcagcttgagatcttaaggcttcacaacagcaggaaatgaaggctaaggcagagttgtaaacagccaggctaggagagggttgggtgtgtgtgtgtgtgtgtgtgtgtgtgtgtgtgtgtgtgtgtgtgtttgctctaggcatttagggaaatctgccaaaccactagctaaccacaagctaacaaaatagagacttcagagtccatacaacaaaatatatagcctttaaaaatagtccggaaaaatgagcaaagtgtttgaatagacatttatccaaagagatatttaaatggaaataaacacatgaaaagatgcataacatcagtaatccctcaggaaatgtgaatcaaaaccacaatgagataccacttgacaccatttggatagctattattgataataaataaataaaataaataaataaataaataaataaataaaataaataaaaaaaataataaaaatggaaataaaacaagtgttggtgaagatgagggaaactgtaacccatgtatgttcctagtgatgataggaaatggtgcagccactgtagaaaatggtattgtattttttcaaaaataaacatagagttaccatataattcagcaagttcacttccgggtatatatctcagacaattaaaatcagggactgaaacaggcatttgtacactcatattcatagcagcattattcacaatagacaaaaggtgaaaacaacccaaatatccatcagtggagaaatagataaacaaaatgtggtatatacttacaatggaatatgattcagccttcaaaaataaagaaattctgacacatgttagaacatggataaatcttgaagacatgctaagtgaaatatgccagaaacaaaaggacagatatttgtatgattccactcgtatgagataactagaggagtcaaatttatagaggcagagtggcagttgccaggggatcatcagagagaagtataagtagttattgtttagtgagtacagagtttcagctttggaagatattaaaaagttctgaagatggatggtggttggtgatgattgcacaacacaacattttgaatttagttaatgtcactcaactgtacacaaaatgactaaaacagtaaagttgggctatctatattttatcacaataaaaaatagtttagaaaagtcactaaagaaagaaacaactccaacccacagcaagcagcaaaaataaaccccaagcagtggcaagaatctggtttctggagttaccacataataatattcaaaatgtcttgttctcaacaaaaaattatgagtcatgagaagaaacaaaagagtatcccactcacaggaaaaaaatgaacaactctccttgaaaaagcacagatattggatctactaactaagactttaaatcaactcttacaaaacgggtgattaccagagcctgggaaggataatgggtagggaggtggagggggaagtagtgaggcttaatgagtacaaaaacataggaaaaatgaataagatctagtatatgttagcacaagagggtgattatagtcaaaaataatttaattacacattttaaaatagctaaaagcatatcattggattgtttgaagccaaaggataaattattgagatgataaatatcccatttaccttgatgtgattattatgcattgcatgcctgtatcaaaatatctcatataatacataaatatatacacctactatgtatccacaaaataaagaattaaataaataaatataaatgaatcaactgttatatatactcaaaaagataaatgaaaccatggacaaagaactgaaggataaaaaaagaataaagaaaaatgaacagaacccaagagacctgtgagacaccatcaagcataacaatgtaaggggagtctcaggaagtgaggagagagaaaaaaaggcagaaagaatatttgaagacataatggttgtaaaactctcaaagttgataaaaggcataaatctacacattcaggaagcttgatgaactccaggtaggataaatacaaagacagccacactaagagaaattgtaatcaaactgttgaaagctctagacaaagaatcttgaaattagcaagagagttgcaattaatcacatacaaatgatcttcaatgaaattaataactgatttcttatcagaaacaatggaggcaagatagcaattggtatatttaaaatgccaaaacaggaggaaaaaacaacctgtcaaccaagaattgtatacctggcaaaattaagaaaaaagtaaatttaagaaaaaagtaaaatatttccagataaaagctgatagagtttttcacaagtagacctgtcctacaagaaatggtaaggagatgccttcaggatgtaatgtcagcaaactcgatagtaacttaaaggtgtacaaaagaaataaaacacactactaaaagtaaatacatagtcctataaaaaggcctattttattgtattattggcttgtaacccctcttttttctcatatgatttaaaagacagatatatcaaatgatgaataaaaatctatgttagtttagtttacatacaatgtataaagatatagtctgtgacaaaaacaatttaaagaaagagatatggagaatataagagcaaagtaattgtatactcttgaagttaagttggtgttaaatcaagccagattataagtttaagatgttagttgtaatccccaggataactactaaaatattaactataaaatatacagaaaaagaaatgaaaagtatacttcaaaaatcaaacacaaaagaaggcagtaatgggggaattgagaaacaggaaagataagacatatagaacacaaatagtaaaaatgtcaaaagtaaatcctttctcacccataattacttttaaatgtaaatgagctaaactctccaattaaaaacagagattgtcagattaaaaaacaacaagaagattcaagtctatgctgtttacaacacattcactttagctccaaagatacaaacaggttgaaagtgacggaatgtaaaaagagatttcattcaaattctaaaagagaactagaatagctatactaatatcagtcaaaatagaccttaggtcacacatgctacaagaggcagaggacattatgtattgataaatggggcaattcatcaagaatataaaacaattgaaaacatatatgcacctaagagcttaaggtttgatatagaaaagggaatgagcctaggtcggtcttgtactaattcagtttaatttacctctctgagtttcattgtgtataactctgcaaatcctctttttttataacatagaaattccttcctacctttctttcttccttccttcttttaggaggcaagttttgagtacctacttttgacaagccctgtgctaagttctggagatacacatctcagtaattatagcccctgtaattgtagactttatagtccaagtcagtagctttcaaattttagtttatatgagaatcccctgggaggctgatagaaaatacaaactactgagcctcacccaatgtgtctgattcagtaggcctggagtgaggccctaagacctgcatttctaacaaacttccaggagatgctcatgctgctggtttgtggaccgaactttgagaactacccgtctaagtcatggattctccattttggctgtacattgacatcacctgtgagctttaagaataccaaggcctaggtctcatcttcagacttaaattgcttgggagttgcctggtcatctggattttttttaagcttctcacatgtttctaatacagaactaaagctgagaaccacttctcatttctggctgcttattacaaccacttggaaaggttttaaaaaaaaatactgatgtctagaaagcattatggattaatgcaatcagaatctctgagaattgagccccagcactagtattgttgaaaaacgtctagtgttgttcaactaatttgaaagtttaaccagagctgaactccatctaagcaaaggtaacatacaatgagtgaaggagagaggtaattttaaatgtcatctttttttgtttgtccttttaaattatcaagaagcagacaggaacataaatggaaaaccaagtctcccataacctaccactatagtatgtctattataatcatacatttttcctatccagtctttgaccatatgtgtgtatttttatatggatcatatatgtgtaatttgagattctgccaaaaaatttctttaagccacagaataaccttttaaaaataataagtaaaatgggtggcattgtcggattttctccatgttcactgaggaaagataacaagaataaacttgatctcagcaggataatttaggcttgtaactggaaggaccttcctagtcagcagaattaaactgctcaaggagaaaaagtggtgataaactaggatatggaacgaggaatcaaagtcctatctagaagccagatgatgggaaaatggccacagagagatgatctgggacttggcagggactgttccaggtagaatgctgaagaccgttagtggagagaatttgtctcttcatctgtatttcacttagaatctcctgtgtgtggttcaacattttgtggtggtttgtggatacactttctagtctaaaggaatagaactagattaatattttctattgtaaaatttagtatctttaacttagaacataatataattatgaaccgtataactaagttttgcaactcatgcagggggattatagataaccctagagcactcattctttatctgttctaagatagtcgggatatgagcagttgaagacattcctcttagttaatccaagtgggtgccaagacccatgcactggagagttgaaacaaaatacaatgagtctgaaatttcaagcagaagttcaagcgtctctttctattctgtcttgatacattgcattgaaagaactgctatggtttaattctatcagtgaaaataacagggtttgtgatgtttttaatttatttttccctccccacattaactttcctcatttgtgtttggtaaatttgcttcaactgctcaatttgcatgaggattaaatttcattaacagatgcaattagaaagtggaatttatagaataagtcttctttataccctaacctaattgacataaggattaccgatgtaattgactagaaatcctttcaagatagtcaagctgacatttaatagtgtttttctctataaaattaagaatgttcactacaatctacatataagaactaataagcctattccctccacccatcacctaaaattatagagctaggtcaattttatattcttgcagcaaaaaactcccctggcatgaggttgaacaaagtctagttaagcttgctatttttttccttttagtagaccctcccttgagtaaaaaaagatagagaagagcaaacggtcttcgctaagtgaactcatagcttagccaaagtctttcagagctgagtacggaggggctgcctcagtgggaagcagaaattaagacctgctcctccatacatcctacttgcatctttagcctcgtttctttacagcagttgtttgcaaccttggctgtacattgaaatcacctggagcaccttaaaaattgtaatgacaagaccccactgtaggattctaatatacttgggctgagatgcagtccacactatgtgagtgtgaaaagctgctcagcggtcctaatgtttggtcgtggttaagagctgctgctttacagtaagcagtactttgcctgtggccaggtaaggcaaaaatgtgcctggggactttgggaaaaagaagcaggttctctcagtaaaagctgtgctccggcagaaagccggttaagtgttccttgctgcctatttaagaagtaacagtgccaaggcaatcccatttgctctggccatgtgataattaacaattgatatttgtgtgaagccagcctgcctaacagaatggtgtgcagtctttcagccaaacagtacactggcgctcctctgtggacttaaaattgcattctaaaaaagtagatggcatttttaataagcaaaaccccagtttaaatataaccaactgaaattataagtaatttggtaatatgacttcatgtgggggtcatcttaacattaataatacctgaaatgaaataatttctaaaatatttctaatctcaaattactacctttggtgatattttgggtgatagactatttttacaaactagaaaagattctaaatcaggaaaagtacataactgaggtctggctttttgaagcacacactcactttttttatgaaatacctgtttgctgaccatggtgtaggccattaatgtcattacctctaccacttgaataaaagtgaatccttttgtagcttatagtgtgtaaacctatgagacttatagtatgtagatgtatgatactgacagccaaaacagtatgcatattatgataaatcactgggtaataaagtagccaatttggaaaattctcaattggagtagtccttgtgtgttggcaaataagacttgcatttatacagtgaacaaaaaagtttgcttaagaattaggagcaagtaattgattttttaaaaatgatgtggttctggtggaagtagtatagccctaccaagtagaaaaaaagcaatcaatttaattaaaaagtctcagctgaaaaaaaatttagttcccatctatagacaggggctctgtccttagatacagcaggaagattcaagaccccatcatctctctcctcccacttctcaacctcctcttggtgtgtttcattgtccaaactcaaaaggaagccaggaggtgaaggctggctgatgcggttcagagaagtttgtctcctggacacagtgcaatatggagaagctagaaagtaggtctgaaaacagagacaatttgactttttgcagatgacatgattgtatatttagaaaactctattgtctcagccccaaatcttcttaagctgataagcaacttcagcatagtctcaggatacaaaatcaatgtgcaaaaatcacaagcattcctatacaccaataataggcaaacagagagccaaatcatagtgaactcccattcataattgctaaaaagagaataaaatacctaggaatacaacttacaagggatgtgaaggaccccttcaaggagaactacaaaccactgctcaaggaaataagagaggacataaacaaatggaaaaacatcccatgctcatggataggaagaatcaatattgtgaaaatggccatactgcccaaagtaatttttagattcaatgctatccccatcaagctaccattgactttcttcacagaattagaaaaatttactttaaatttcatatggaaccaaaaaagagcccacgtagccaagacaatcctaagcaaaaagaacaaagctggagacatcacactacctgacttcaaactatactacaaggctacagtaaccaaacagtgtggtactggtaccaaaacagatatatagaccaatggaacagaacagaggcctcagaaataacaccacacatctacatctttgacaaaccttacaaaaacaagcaatagggaaaggattccctagttaataaatggtgttgggaaaactggctagccatatgcagaaaactgaaactggatcccttccttacaccttatacaaatttaactcaagatggattaaagacttaaatgtaagctctaaaaccataaaaaccctagaagaaaacctaggcaataccattcaggacataggcatgggcaaagacttcatggctaaaacaccaaaagcaatggcaatagaagccaaaattgacaaatgggacctaattaaactaaagaccttctgcacagcaaaagaaactaccatcagagtgaacagacaacctacagaatgggagaaaatttttgcagtgtatccacctgacaaagggctaatattcagaatctacaaagagcttaagcaaatttacaagaaaaaaacaaacaaccccatcaaaaagtgggcgatggatatgaacagacacttctcaaaagaagacatttatgcagccaacatacatatgaaaaaaaagctcatcatcactggtcattagtgaaatgcaaataaaaaccacaatgagataccatctaacaccagttggaatggcaatcattaacaaatcaggaaacaacagatgctggagaagatgtggacaaataggaacaattttacactgttggtgggagtgtaaattagttcaaccattgtggaagacagtgtggtaattcctcaaggatctagaaccagaaataccatttgacccagcaatcccattactgggtatatacgcaaaggattataaatcattctactataaagacacatgcacatgtatgtttattacggcagtgttcacaatagcaaagacttggaaccaacccaaatgcccatcaatgatagactggataaagaaaatgtggcacatatataccatgaaatactatgcagccataaaaaaggatgagttcatgtcctttgcagggacatggatgaagctggaagccgtcattctcagcaaactaacacaagaacagaaaaccaaacaccacatgttctcactcataagtgggagttgaacaatgagaacacacggacacaggaaggggaacatcacacactggggcctgtcagtggttggggggttagggcatggatatcattaggagaaatacctcatgtagatgacatgttgatgggtgcagcaaaccaccatggcacgtgtatacctatgtaacaaacctgcacattctgcgcatgtacttaaagtataataaaaacttaaagtataataaactttattatactttaaatataataaagtattatataataaagaacttaaagtataataaaaaataaaaaaaagaaagtgggtctgaataggcaaacagaaatatatggtatatctgtttaaccaacagctttcctctcctttctctggaaatgtaaccagctagaagactggagtagccatgtgactaattctgactaatgtggtgtaagtaaaagtggcaaggtaggactttaaggaagattttttttctcaagaggatatagaccccagaacctgtgttttgtcctcagtcatttcctccttcatgatacctgcaaaacggaggtgaagattgaggttccaactgccattttggactggatttaggcaaatttgcatttggatgtcattgctaaggatgggagagcagaaatttacaagaagtgtgtgcactagtgactaaagccaccacagcagcgctggattcctcttctgaatttattccctgtgaaggaaaattaatcattatatattaaaaaaatcaacagttcaaaagtttcatctcattatgtatttgctatcaattatataattaaagtatgatgtaggaatttttaaatcatcgcttttaaattttaaaaattagttctaagaccccaaactatgtgcaattttacaaagtatatttgactgccttacaacaggctactatctacttaggtattgtgcttacttcagatgaaaattgtgccttatcaacaggtggaaacaatcattaaatattaaaaatatttgcttaatgtagcaagtgaatgggtggacgaatcatctcagtttctatcgggttttcagcatgtgaacctagtgtttaccttgtcaaaaagttgattgtttctaataagcaggataacagatattctagcaccttcaaagtcgaacagagctgagaaatgaagtgtgacttatcctgtggaatgtaaaaaacaacattttttaggaagcatgtgaatatgaatgagaggatgatcatcatttaaatatcaccaaataaacataacatttctgttgggcatcttttgagcagttagattttccatggaatatgttccagctttgttttgcttggttggtaatcatagcactgaatttaataaatagatattattgaatttccttggaatgttcctggtgttgtaacataaatttagtgcttaactggctatgatatatggctacatatctatagtacttacaggtggtgaagtctgttttaggttttctgcacttcggttacttagcttgagctatcttgagattataaatcacttcttttttttttttttttcaaactacacattcatgacatacagcatcaacagaagatgatttattctgtgaccctactggcaaaagaatatattgatactataattttgctaggtgtcatttgttcttgagggttccttgtgttggtatgcaatagcaaattaatccagaattgcaaggtagaaggaaatataacagaactcgtaattctgatcctgagtcagttagctgaataacttgatcagatcacatctaatttttctcaatgagagcactactggcatctcaggccattgtgtgatattggcctgggcactggcctcacaaacactgcaaagcagtagcactttcagccagttaaaatgtcacggacttctgcagcagcctcttgatttgtgtgttccagaacttgagctccagggacgatgggccaagtttgggagcaagtactagagttttaacttaaagttaaaagcggaggggtgctaaaatgttgactctgatacaggtctgtggcaatttaattccatttccccctctgtcttgaaccccttctacttgaccactaacagtttttagcctaaattatccggatacccaagtcttcacttcattctcccctgtggacaacccaatgcctgggaacatgatgttcataagtttagtattctccaatacatcaagatcttgatggaaaatctctctaaaatagtaatgggaaaaatcttccctccaaaattccaattattttgagtgaacatcatcatgcatataaaaccaatgtcactggcatgcatcagaaactttaatttaacataggttagcaataatcattagtagtcgaaacttcattgctgatcagtagtgggatggtgcctgtgaatagccactgcactctagcctgggcaacatagcaagactccaactctaaaacacataaataaataaatactttaaaaaaatcattagtaggtggtatgttccttctctacttaaaagcaaccaatgttgaaatgtccatttgaagttgttaaaaatttttaaagacatgacttagaaattgcgacttagcaactaaagctgtgactttgaagtcaatttatactttaaagggaatctattatcagttaagttttcagatctcataaccaaattggaaatctgaagaagtcagaagttctaaaatgcagtgttttgaaaggacattgatatatagttgtgatattgtcttagcaacacatttttctttaaaagaagaatttcttcttgtattatcaatccttaaaatgggtcatgtattcttggaaaacagggtattcatgcaatctttaaaacaccgtctaaacttcaagtgaacttcaaacagcccaaaccaaatatatgctggataaagtgtattgtggttactggaaaactttaaaatatgaaacattcctattgctgttggtattttacctctgagaattttctagccaaagttctatttgaacagaggtcaaaaatcagttactgcgtgggcttttcttaagggatgaatttaatgaaagggcctagttattgcaacatatgctgccttcatttcaaaagatttccttaaagcataatgattaaagcctgtggagaaaaaaatttgtacttttcaaaagctccatgaagtaccccacagaaggaaaaacaaagttctgaatccacatatagaatgaataaatattccttttagcttaaaagtcataaaaatcattagttatttttgctcccttttattgaaagtgttttaagagttttaaaagaccagtgtacactgtatcaaatattcctgcttatttccaaagaaaagtgaactgctttattttgaatttttttttttctttacacagagtagggaagaattcaaatgttcagcaagtattcttaagcacctaagtcattgcactaaagtaaatctcatttgatggctctcttaaggtggattctctagaaccaaagactgagagacacttttgggtacaaagagtttatctggaaggtgatgtcaacaagcaccagtacagcggggagaaatagagagaaggaaaggcagcaaggcagccaatatggtgtgagttaacaagcaggttactattgtggacaactggaagctaatcccactggagtattggggatgagaggttataacacagatcttactgttatcccacatgaggggcaagggagcagaggtagttatccaccaacaggttttgattgatggatgcatctggtttgtaagggagctctcccttgaaatgctctttcattcaaccactgctgctcatcccatacttgggcctactggacaccagcaagagtgcctttaggcagaaagcttcagttgtttgcctcgaaagtcatcgtaggaatgatgggaactcagaaaatattgccaggacactgactacatctgccacggtgaaaagctgtctctaaaatccaactacaaagtaaacaagtatttccccaaaagataaatgttaatagtaaaatacatatcagaaattatccaaactgtctagtaatcagaaattaaaacaggattaatccaaattgaggggtatttaattatcaaatttttataaaactgtgataaagcctaatatggcagggtactgttggtactaagaatattatttttaaaagccacttggcattgtgtttcaataggtaaatcaatgttcacatacactgacctaatgattaaatttctaggatataagtatgaaagaaacgaaataaaacttgaagagagtgacaatatcctatgtgtccacaaaaatagggaaatgattaagtagattatagtgtatgcaatcactgatatttttataatcaataagattagggttgttaaggtaagtattagcatgaaaataaatgcttatactgtaacaataagtagaaaaatgatgcacaaaagtatacatgcattccagttgcagctatcttatttttcaacagcattaaaaactactggaaggaaatacatccaaaaggctaatagtgattaaaatttactaccagtgtcaattacaatgttttatttgcaaggaacagaaaatccaactctcactggcttgagcaatgaaatatatttcttcatgtaactgtgtaactagaaagcccaagggttgggcttcaggtttgaaccagccagcagctcaaccaggtcattaaaggtctggttgtttctcttcactcttccttaatgtttgcttcatgccaaagcaggctgtcctcttggttgtcattttgatgccaacagaaactagaactagaaactagatgcttccatgctcacactgagggtcagaatgagggcttttatccctcaaccattgaacaaaatttcagaggtcatcttactatcagctacaagcctgtcggtgaacccaaaactgtggctgggggataagattggttgtaagcagatcagggcacccctctgcaacagtggtggagtcaattcccctctaagtctgtggcttccacccagtgaggaaggtagagagtgggtgaagaggagacaatgccaatatctacggtaatatatgaatatatataggtatatatgtcgtttttgcatgtgggtgcatatatgtaaagatacatatatacgaacacacccatcaacagaggaaacacaactgcacttaccacgctgattaatttttttatttactcattcagctgacacctactttgttccagacactatcttagagaccccagaaacaacaataaataagacagttaaggtccctgatctcacgcagctgacacctactttgttccagacactatcttagagaccccagaaacaacaataaataagacagttaaggtccctgatctcacggagctgaaatcccagtgaaggaagacaggcaataagcaaatgagttcatgatcaggaaaaatggtatgaagtaactaaagcaaggtgccagttggagtaaccaggtgtattttgttttcttttgagtggttagaggaggactctttgaggaggagacatttaagctgagatctgtatgaaaagaagagccatccaggcaaagatcaggggtctggagcacacagagaagaaagctcattagtacaaaagggctttaaagtcaaagtaatcctgggattttggagaaatcacaagtcctgtgaagcagagccatggtgtatgaaaagtggaatggaataaagagagtgtggaatggtatgtaggcaccaggtcatgtaaaactgtggagacaatggttggaatttgggtgtcatgcaaagagcaaggagactcatttgaatgtttttagtagaaaaagggaaatacctatttgtgttttttagaaatctgtttgggaggccaggcatggtggctcacgcctgtaatccctatcccagcactttgggaggctgggacagagggatgacttgaggtcaggagttcaagaccaacctagccaacatggtgacactccatctctaccaaaaagacaaaaattagatgggcgtggtgccacacacctgtgatcccagctactcgggaagctgaggcaggagaatcacttgaactcgggagacagaggctgcagtgagctgagatcatgccactgcattccagccggggtgaccaagtgatactccgtctcaaaaaaaaataataaataaaaaataaaggatctgtttgaggatggtttataagatggcttgtggagagacaacaggaaattcaggcctgtacttgtctaggcaagagatggtgacgacttgaactaaagagtaatagaggattgagaggaatggaaggcctgatgtatactgtgtggagataatgccctatgtcctactgatggagaaagtcatggaataaaggctaactcaattattttatgtgagcaactggtgggttgatgggctgtgaccaagatgaggaaaacgagggaagatttggaaagaaagggaagaactaagaacactttatggacatttaaagctcggggtgtctgttagtcattagggctgattacatatttgctggcacactccaaaagtgaaactgaggggcccttttccaaaaagcaatgggggaagtgccaataaagatactaaaatagaacacttttctttcttctgcaatctctctcttgactggtaatggtatttttttaaaaattactatttaatgtcattctaagtaaaaaaaaattaaaattgtttattacgagttttaacattcattcttacattgtgcaatgctattttcagcaaataaaatgccattttaatcatttaatttatatacagaatcacaaaaattatacaattcacatttcatagatagtacatgcctatgttttttgttcttatcaagatagaggaactactgtacaaaactagtatcattgtttttattttacttcttgatacatgaacaccctaccagccttctgtaccttcagcttacttatgagaaaggaaggactggaaagaaggggaactctgggttgttccatctttctcactttttctatgtcattatattcagtgtaatggttggctaatagaaataacacataatgattaggattattggtgtttcatgttttagaatgctatttctgcatttgaagcaagttctgattctaatggaaagcatgacttttcatagatgtgagaacctggagatgtaacacttttatcatgtagttggtttgagcctcattgaactctcattgtggatccatggacattctgtgcacccgagcattgcaaattcaatatgtgagcagggcagcaaagaacaatggacatgtatcttgcacatatctcctctgcttatgtgcattctccattgttcgatcagacttcagttacaaaacacaagctcaaagataaaatgatggagaatttcaggacaatgactgcagaacattaaactaagcatgggtccttctgagtactgggccctgtgtgactgcagaggcctcacactcatgaagctggccctgcattcatgtggaaatgtgtaaaaaatagatattgaagtcgggagagctggtgaaaggtcatttttggagatgtaggcttgggaattattagtatttatatatttaatatttagggcatagacagggtgagaccacctacagggagtgtgcagatgaagaaaatttctcagaaaagaatcctagacactccagtaacacaaaatgccgtggacctgaaaagtatattgagaaggaatggccagaaaagtaggaggatagcaggaaagtccaaaattctaaaacccattagaagacaatagttaaagtagagggatatgatcacttatcttgaaagctactgagatgtcaagcaagatgagaaaggaaatgtcattattggatttgccaacataggggtcattggtgaccttggtgaatacagcctctctagaaaaaggaggacaaacattcaagtgaatattcaggagataatgaatggtgagaaaggagacagcaatgttgacaactttttcaagaactttaactaggaaatggaacagagaaatggtgctgtgtttgccgaaggatggggtatcaagggaatgatgtcaatatgtttggcagcaattattttcaatgctgcatactattccattctctgaacctattgtaaactatatattcatgagtgtttagtatatacacatacctctgttttgcaaagcagtttgtcatgctactaccatcaacagggacaagaggtcccaattattcacattctaattcaaagtgtgagactctggccaaatgatccttctgacctctctgtaaaaagaccaagttctaaatgactttggctttcactttgatctctgttaatcaagatttactctgagctcccaaaggcataaagagctttttccttctggtttcttgcttctctccaagcaggactttggagtatcagtgggtgattacagtgatagtttccttcatggctttcaggccatgaacaaatgaaaacagaacaaaaggccaagaattccatgcttctgtaagtctgttatttcagggtaattacacatttacatttttgcagctagcagctgatggacattgtgcaaaagggaaaaaaagataaatgtagatttttttaaggttttctttatgactttgtttttaaagactactttgtgtttgaaacatacaaattagagctcaaaagtttccagcaattagtttacacagcaaaagagaaggaatcaaggccaaagaacaatcttatttaaaatgctgtggttggcctggcatagtggcttatgcctgtgatcccagcactttgggaggctgaggcaggcggatcacctgaagtcaggagttcaagaccaaccaatatgggtgaaaccccatctctattaaaaatacaaaaattagccaggcatggtggcgagcacctgtaatcccagctactctggaggctgtggcaggggaattgcttgaagacaagaggcagaggttgcactgagccaagatcatgccactgcactccagcctgggtgacagagcgagactccttctcaaaacaaaacaaaaaaatgctgtgtttaagaagagggtatctgaggatcatggaattttagtcacagaaaaaaacagaaatactaagtgtttattattcttaatcagtttcatcacatgtaggtcctgagtcaaggacttgaatgaaaatcgtttattttgaagaagttcccagggaacagcattagaagtatgtcgaagggaggaagggaagtgatgtagtcaataaaggatatgttatcaagccattactactgtgggcaaccagagtcaatcccactggaaactgggaggcatgatcaaatacaagcctcagagtttccccactggaggtgcaagggagctgggatatttatccaccaactttcttgagtcattggttgatggttgtttccaggagacatcaactctcttgcacttccagcctgttaggccttaagcaggctctggccatggaaaaatcacttcaacagaaaagatataaaggctgatagttagaagtcgagtccaaattcaataagatggtaaagagagacacagctggggaatcaacagaggcctgtaatcggtatggaagggacaatagtcgttaaaacaaagctccctctgtacttgtttctgacactaatccaaatgaggacctccaattcccccttaggaaatcatccatttagtccaacccatagattggcttataaggacatggaggctcagtgatacttagtgacttgctcaagggtgcacagatgcagtagagaaattggacatcttgatgtattaatatgtgagtttgatgaacatgagtaaaatgtgtcttcaaatatttagacagagagaaagaaaatagctgtctgagacattcaagtgaagcatttcaaatggaaacttcttagcttatacttagccccagccagactcagaaacagatataggcactagactagacagcatcaacattccaacaggagttttcccttcaccgtggaagattattattgtgcccacagaaaatgtctgtgcatagacagagcccatatgactcttgcattttctttcctgacttagacataaatttggcaaaggagcatcatgcgaagtggacagaacgttccttttgtcctttgaactagacaagaatcaggcaatgaccctgccttagcactttatttagagatgaattcccccgctctagggttttggtggacaggtttatttcactgtaagtgggaaaattcctggctgtttctcacctcaccgaagagtgctaacagagggattcccattgatctgatttgtttgcactgtaaggctggattcaacttcagcgtgaaatcatcttgcaatctgaaataatcttgattggatttccgtttggattaacatcacgtaagagttgatatccactctaccatcagagattgtggtctatgctacttcttttgtccctttgttttatataagtaacgagcttggagatgtaaatcagtcaccattttaaactgattgatcaaactcagtaagaaataaaaccttttcatggaactcactcagccttcaaacatttgcaaattaactaagtcataagtactctagaccaatttataaaaacacagttaaaatatctcaattaaaatcatacatactcacatgttcaaataaactgcaataagcttctataaaattgcttagaaaatataatttctgttttaaatttgtaaattatttcccaggtcatcaaattaataattgaaaaaaaccttctaataattggtgggtatttctgcctaattttcattaaaagtggtagtttagtctgtcctcctgaagcacttaacctgattttatatcttaataaaggaacactatttaggagtttggggactgtgctatgctgtgaaagccattccttggagcccatttttgttattgatgaaattcttccagtctgggatgaacaaactgtaaagccataaataaaagaccaaggagaagaaagacactctgatcagacattcctaattctaaatatagtttaagaatctgtctcctgttcattttagcaaaaggtttggagataacatttcacactgacatatttccatacaatcatttaaatttattatttccagtttttagtgtaaatatacatatacacatagtctctctttatatataactaaaaatctaagctcatcctagaaatattttgggaatatgtattttataaagaaacagaatcagaatataatttgttactcatctctctttccaaaggcaacccaagttaatttcctggaatctctcctagtagtatttttaagcattcatttgtcttttatctagctggaattaagttaaatgtgggattgtgtttcatgccattgttttatattgtaagatattaaaacataatatttttaagttgtagccatcaatttaatgattaactacacaataattcatacattacctacatttctatgagtttttcaagtctacgtgtgatggtgagacctgcatttgagataaggggcaaaccgagtgcatggaaggaggtacagaggtaatattagagagctgaccttaatcctgtagagccaggtcatgaaaagggagtagagaacctcaagagaagagcagagggagaaagaatgtgagtttgacgacaagttgcattaataaaaaaccaacaatcaagtcatgtattatttgtagacatacaaaagataaatactttttaagagtcttgaggccggatgcggtggcccaagcctgtaatcccagcactttgggaggctgaggcgggcggatcacgaggttgggagatcgagaccatcctggctaacatggtgaaaccccgtctctattaaaaatacaaaaaaaaaaaaaaattagctgggcgtggtggcgggcacctgtaatcccagctactccggaggctgaggcaggagaatggcgtgaacccgggaggcggagcttgcagtgagccgaggtcgtgccactgcactccagcctgggcaacagagcgagaccctgtctcaaaaaaaaaaaaaaaaaaagaatcttgaaaataacaatgttgaatcataaaagcatttcacattttccttgatgaccttctaacttaagcaatcttaactggcaaaactaaaaaatcaaaatattaataattcccccacgatatgtgtcctagtttagtttataagtcttggcacttaagagatctaatgagaacttacatttaaaacatgttttaaaataaattttaaaagctagagataaatccatggacagtaaaccatgctagaggtaaatccatgggcaataaaccatgccagttctcttttctgtgctaattattagattatcaatgcctttatttttctcccctttctgtcttcctcttttgattttgttttcaatgttaaaatgccaaggcacttataatgcttcccatattaggttttcttctgaaaaccatttgtccttttctgtataccagattctcattataactgggtctgtgcgtgtgagctgtggagcctccacctttgtaaacaagcctaaaaaaattgcttctgtaactaataagcctgatgccttcagcccatagggatctctttcatctctgttctaataaaacttactagcaattaactcataatcctaacctctgtaagcctttgtaatttatttttggtatactcattcctttgtcttcactgcttaataccttattaagaataaggactatgcaaacttttgtgtgtgtctttcagacaccaacccagtatttggcacataatatacctgccattaattaatatttttgctgagtgagccaacttcctttggatgggcatgagataaccacttctgtataatacattctctccagggcaattaaagcagtttttcagtgtgtgaaggttgtaaatgatcaactctcaacagtccttgatcttttaaagcacaatgagtgaaggaaacaaagctgttgactcataaaaatgaattaataaaaagtaacctctcctaagtaagaaatggaatataaaggatgagtgttgagtgaccacaagggccataactggaagttgtgatggagaacacatgtgagttatttgcaagaagagtaaacatattaaagatgaaaagctctgtgcaaagaatagtcctaaccaatactgtttaaaggactatccagagtacagacgatagatggaattcttagggaaacagcctgtgcttgttcccccaattatttctctgggctttgtaaacactgcatatttagtgtttgtccattaccattcggggtcattacaaaagaactcagccttgacctggattcctgagaaataaattacagcttttcttattaccttccagtagaacttgaagcaataattcaaactctacgttaagtcatcatatatgatcacaagtgagtatgttaataacaaaatggatattcatatacagacccgagtaaatttctgatggcagtcacatcttgataggaataaatactgattcattacaaattacttaataaatgtacatctggattctcaagcattataacagatgatagaatattaatcttgtttgttttcagagcacttctttttctttaagttatacttgctgctatttacttcgccagaagactgattgcattattggccccaattcttcatcattactacctccctggatccatgcccttagacatgtaactttataattgccttctactcagcaatgtgacacattgcaaatgagatgttggcaaatgtcacatctacagagaaataaaaagcagttgtgcaattgggcttgctcttagggttgtcctctgacactgccatgagaaggataggcccaggctatccggccagaggaggaatcacatgggctagagctgagtatccacagttgtctcaaccaaggcaaccctagataagccaacagcaagtctaccttcacacatgtgagcaggctcagtcaaggcaagcacgaccatgcagtctacccatacaagcgtaagctaaacaactacttattgttccaagcctctacatgttgggttagttcgttacatggcattagtatgaaaatacctaactgatacaccttgatttctcaatattcaaatataattgcttcttattaatcctaagtatagaagcatatggacaatgactagaaagactttgagtaggtcccattcataggatgtgatatcaaattaaattaaaaatacaatgtatttttcccacaaaatgctgagaaagtttgaaccattctgtcttcatttttttttcctacactaagaaccaggtgactatagaagagtctagctggccttatattgggttctctaggattatgtatggagggagcatgccgtgccacaggggcccacatagggaagcaccaggatcatcaggagacagagggagcaaggggaaaaatgtgagcaaggtcttttattgttgtttccacaggaacaaataggcaaggtaatgtaaggcaggcttaggattggcttgtttgaataatttcagcaggctctggggtgtaggagctctctctattgtctggtacctggccctgggtgatggagcagtagaatattggccctgagtatgacagcctaatgagaaggtggtgggtatgtgggctctggattggttagtttgtatatgacaggtgttgtccttgttcactgtctccaggaattagctagccctcagtggggcagtgcttccagtgtcagcgaactccaaactggggtggccccacatgtcaaagcatcaaaaatacagaaaataaaaaggcatgactaatacaaccttcccttcaaaaatacactcctaaggcaataatatattactgttcttagagagaaaagttaagggagttgcactgtacttaaagtcatgtagttacgctgtgataatgatacaatgaccacaaaaatctcaaaatatttttaaaggaatcctcagtcttatataaagtttgcagtgttaacttcttgctatactgtcctctttcgagggttttctttccaatgatcaacattgattgatgtaggaccttcttagcgttctgctaaatatgtgggaaaaatacatggcgtgtttcctgaatttgtggaatttttgcaggggaagcaataagagagaaatagaaggcaatgtgaacttaatatgctttaataatgatttactgcacaactactgggtgctaggcactatgataggtgctgggggatttcagtcaaatgccatttatgctttcaaggaactcatagtttaatgagcacaaattatatgaaaacaaatgattgagctatggtgagcagtcaactctgttggaattagtcagaaagcttcagggaggagatcatcaaggtgggccttcaaggatgagtttgacacagggctgtaggtgacacttcgggcaaagggaactgtatgtgcaaaggcacagagtcaggaattaaagtgtcataagaagctacaaacatttcctttacaaccaggaactggggtgtgtgtgggaaagtggtaagacattaggctaatccagaagcaggttgtgatcaaggaggagctcaaagtctgtactaaggagttagggctttaccccactaacaataaggaacaattcatgagtcttaagcagagaaataatataaacaacctgcctgcttaaaaggttattcaggctttgctatgaaggactttaagttctctgagggtaggaattctatccatctttttcacaatctgtaccccagcacctagggcctggcacctaggatgtattcatgtagctgagaacgctgtgctacttaaatgttccaatgctcccccgtacttcctagttctctttgcagttagactggagccctgtgattagttctgtccagtggttataaccagaagtgacttggcgaccatttggatataggaggtgaaggtgaaaagtgaacctaggatgacatttgaaatcttgcttggggtggttcagaacaggttataaggaacaagtatgggacaattttggatgtcctgagttcaagatgactgtgagatgaagtttttaattagaatagagctaaatgttacaaggtttgacataggcaacagttactatgggaaatcaggaaggtaaagtattaaacatgtagcactttgtgggttctgctagagtgactcactatccaggtttgcccaggactgaggagtttcttgggatgcatgaaggactgtcaatgccaataccaagagagttccaggcaaaccaggatggttggtcatcctaagcctgctataccttaccacctgcaaagaatagctattgagtatttctactctgaattcagaagtttgtattcctccgaacctctgtatctcaactaccattcagttgtatggaaaatgaatccaaattggccagagtaggcaagaaagtataaattctgtaaaccagtgttgtgcgagaaccaattcacaccagctcacaagagctgattttactcatttcttcacaactctacatttgctgagtcatgcgaataggttgcagttggccatggtgggagaattgacactatggaaattagcaagttctacatattagagcttctctcccctatccccaaccccagaactggttgttaaacatttaccaggacacctctgccataagctgagttgaaaaggtttggaagacattatattgtggggatagcccaatgtagatgctattggtacctcaccctgcatccctttacctagggagtgcacttatcccccaggtgctgtgagtgttggcagctaacaactcacaggcacccctttttctaggaattgtcctcagccaacaggagttgccgtggctggaatacctgggaggtaacgccctacacccaatagtggcccgtagcccatgattgactcatagagtggtgtcaaaggtcaggctttttaccctaagttgggacagcaccgtggtaccattcatactccagaactctccaggatcaggctgagaccagtctccagctgtaactacgtccttgcctagctgcctctgcttccctatattgcttcccttattccctcatctgtttcccctgagagcttctctcaatgaatccctgccttatgttcatattaataatagccaaaagtagaagcaacccaaatatccattgatggatgagtggataaacaaaatggagtatatccatacaatgtaatattatttggccttaaaaagaaaaattggctgggcgaggtggctcatgcctgtaatcccagaactttgggaggccaaggcaggcagatcacttgaggctaggagttccagaccagcctggcccacatggtgagactctttctctactaaaaatacaaaaaattagccggacatagtggcacatgcttgtaatcccagctacttgggaagcagaagcaggaggattgcttgaatccaggaggtggaagttgcagtgagccgagatcacaccgctgcactctagcctgggtgacagagtgagactccatctcaaaaaaaaaaaaaaagaaaaggaaaatgattctaacacatgctccaacattgatgaaccttacattgatgaaccttgaagatattatgctaagtaaagaaagcctgtcataaaaacacaaatactgtttgattccattcatatgatgcatatagagcagtcaaattcatagaaacagaaggtaggatggtggttgccaggggctagggagaggaaggaatgaggagtttttgtttaatgggtacagagtgtctattatgcagagtgaaaagagttctggggatggatactgtcaatgattgtacaacaacatggatgtctttaacactgctgaacttaaaaatggtaaaagtgataaattcttatgttatttctattttatcgcaattaaaaatacaaaataaaagacattaaatagtttttttaaaaaacataaaatacaaaataaataaattatttaaaaaccctcatcttaggctctgcttcaagggaatctaacctaacacagtcagcccaggagaatttctatggaatgaacatataatctccagtacatatgccatgtgctaacaaacacatgagagaactttatgatctgtgtgctttcgttgagcagagaacgtccctttgattcctgagcttactggaatatcattacgtaattctcccccatttcctgctgcatacctacaagtaatctcaaaaatgctttcaaggagagttttcaattttgcattttgaactttggatctgccttcatttaactaagtgagagaaggagaaacaaaattccagtgtattagcatgacatttaaggtggagaaatgtaggcagcaggcaatcatgtggagcagcggtttacagctgaattctaccatttgtagctacttaacatgctgaaccattcctctctgtctggaaaaatcataaaaaggggcccgtcagcactctgagtcactgctaagaagcttatgcagcctcacacctgcatttaaatgagtgtttccggggcaaaaatgaaggacctcagagaaatgaaacggagcactctagcagagaaaaacgatattggtttctgtctgcatttgtaaattaactacaagaagaacacttctagaattagtttaattattaatagaaatcgctttgaacaatttttttgcttcacattttattttaaatgaggacggtcatagaaggtttatcattaggtggcaaaatttgatcatattcaaaatgtaaagaaacagccactgataccaaggtatggtgcctcacacaaagtaggaattctgtacctatggggtgaactcatcaattacgtcaaactcaaacataggtttcaaaaccaggacttgtgcatacttcatctttagtttcttctttctcaaattttactgcttagtaaggtatagcttacatagagtacagtgagtaaattttaagtgttatgttttgactaatttacacaaacacacacacatacacacacacagacacacacacacacacacacacacgtggagcccccatccatattgaaatagagaatttctagtgccccagcaaccctccttaattacctccccaccaagagaccactactatagatcttcctaaattttcacgcttccatggaagaattgtttttccaagttggagcaggagtaatctagtcatagtatcccttgattcttatttcaagattctcttttttttttgagacagagtctcgctccgtcacccaggctggagtgcaatggcacgatctcggctcactgcaatctctgcctcccaggtttaagcgattctcctgcctcagcctccttagtagctgggactataggcgcccgccaccacacctgactaatttttgtatttttaatagagatgatgtttcaccatgttggtcaggctggtcttgatctcctgaccttgtgatccccctgcctcagcctccaaaagtgctgggatcacaggggtgagccaccacgcctggccctcaagattctctttagcccaacatgatcccaagaaatcattagtcttttactgcttaccctcagaagggatcacccttgcactgccctcattgggtgctcttgcccatgccatggccagggtctcattgtgatccttggagcttcggcttacttttggggggcaaaatgcttccaagactctcagtattatagctctaggtccatttctagatgcatgtcctaggtgctgaactaggtcttttcagacattccttacctgccagaggtaagactttctctgtgcatgtcctggagccagagccaccatgctgtcccataagctgcggtctgatggcagaggcagactccattgccaagactccagttcactgacccttaattgtgcacagctcagaagaggtcacagtttggctcagacttcttgaatagcttctagaagaattgtttgaaatgagaagatgttggaaagaactagaaactcttctttcatgatctactccacacacatttcactccaataatactaaacagcttccagttcctggtctaccatatcggttcatgtctccctgtctttgatcacgttattaactctttttagaatatatcacgtttttacccctcttgacgtgatgctttttctttttccaagtctgagctgagatgtcatattctagaaccacaagttcagctaagtccctcttctctagggcctcatgctaatgagcttctttagcattgcttccactgtctcctaaatgtgaggtggtctctgctccttgccagctccaagtgaccaaatagtatctttttataaactcaaatgtagacactatctccatgaaatcttttcacctcttctccaatgaagcgctttgcttcttctctatgtatatttgacacttcattaatacccctcagtggtttttcatatttttatttttcccgttagattgtaaaacctccttcagaagagttttgtttgacattgaattccaatctactccagtgcccagctcattaccccagattcaataaatgctcgctgaatgaatgcatgcagagctgagtggataagcaagcctccttgattaatcacatcaattaaactgggtcaaagatgttttgttatattggttccattatctgactttcggaaaagcaatgtgacctacagagttgacatgcccttgatatggcaaaagatgagtttcatcctcaaatatcccattagcattttattttccctgcttagagtatatggttgacttattcctgtcacagacctaagtaactactaatattgagattttctctctaattcttctgacacttcttctttttcttttttatttatttattatggtttttttttttgcctaaaaagcgtcatctttctggatcacgtcaccgactctagcctttggctttctatccagggacatttttcacaaagaaacaaaactgtttagtgatggtagcagagttatcaacatggtaagtagggaaaaacgtatttgcatttaaaagcaaatcctggacctgtggcagagccaggcttgataattacgtcccttacattggccggcctgataaagcttggatattcacagtgacaagtagcaacccgctatagaccttagtggtcactcacaaataggaaaaaaatcttggaatgttaaattcgcagattagagaatccccttttcacattttctgcaaaatccattttgatgcaaattagattacagaaaatttaagattctcataaatgtacatcatatttctgttagtgacgttttacccttgcccctccacacctttgtgtttaggctcacacatttcaatttcaaaacccagaaccatggtattaattctaaaatctgagctactaaagctggggccctcaagtaagtacaccatggaatctgcgagatagaaattcctagcctcgcattttagtttaaaaagttttagtttgaaagtatgggggatgagctggtggcataagctgtataacaatgatatttttattaaatttgaaggcctaaaaatatcctgtagtaggggaaagtacttttacccaccataaatgttattaggtttgtgtaattgtgccaaaattgtaagggcaaaaatgatctgctttgctattgtctaaaactaacgccagcactatcaattaaaaaatatatatatatatatgatctcaaaaagggagatggtgtagaatctacttagctttgagcagtaccaacagagaattctcctaggactcatactaaatgagttgggttattattaattagtaggagttaaaacaattatcagatcatgtacagcactgttcttaatgcagcctgcctagggaccctgttaggagggtgtgtggccatttgactcttgctttctttatgtaatatcataatgacccaagctagggggattccaacaatgatatacagcagcttatacaaaaggggacttcatgtcattccaaagagtgaaagaaaaacaggaaagcagatgcgagagcaaaaccattccttactgaagacatcatgagtcctttgtttttctttttctattttctattgtcaagaatatttatattcatccaggcaagattgcatggggaggaatatcacagttgtacatttgttgccattgggttctggtttacaactgtcttgcctgagattataaattttcaggttaatgcagtactaatgcagaatttgttcatcctggaatttgtgtatatagcatattaagtaaatccaaagagacaagtagcatatgaggtaaggagtcctgggtttgagctttttctagtaaagtagccagagattgtagttagtaaacatttctgaatgttctacagtacataactgtaaaatagaatgataaatgaggtgacttaccaggccacttccaattttgaaattgtaagatttcattcagtctctcccaacccccaccaaaataaaaaacttgtgaaaccaagtctgtaccagactgacgtgtatcgaaactgtcactctggtgttgagataaatagccataactcttagttactgtaaaaaatagttgagagttatggaggatatgatttaatacatgcttattgaatatatacttcgtgtaaggctctgcactgggaattatagagaagttcaagtatatttaaaacacagcttcttacacagtacctggtctgaagaggcctccaggggaggtgggaagatgaaagaaataattttcaaaattattttggagaagggtagagtagctcaccatagtagtggtctgtctcttcaacaaatgacacttttaaattgctttgatttttgtttctaacttcttaaaaaatgtgtatgcaaccaggattcatattttattacttatatagccaatgttaggaactaaattgtgctcaccccatattcatatgttgaagccctaacccctaatgtgactttatttggagatagggactttaaagaggtcattaatgttaaatgaggtcataagggcaggaccctaatccaatgagactggtgtccttataagaggaaggacaccagtccctcatctaagaggaagaaacatctgagaagcatgtgcacagaaatgaggctgtgtgaggacacagcaagaaagcagctatctgcagaacaaggagagaggctgcaggagagaccaaacctgtccacaccttgatttttgacttccagcctccaaaactgaaagaaaatacaattctcctgtttcagctaccaagtatggtgttatggtgtggcagcccaagcaaactcatgtagctgatttcatgaactttcatgttttctgcactgtggcttttctgatgtttgtaattttccccattccctctccagtcacaaaactagaacacaatcttgggaaaggacacttgttcccacctcccatccccagcacaaaaatctacaaacacatatcggacaagacaacccacattgggccagtgtcttgtgaggggtgtccgacatcatggtaagtcagcaagggggagagactgcacttctaaagtgtccagtacaggctccaagagcaggtggcatttgagctaggccaggttaattcccatcactgttttgtctttgggcttagttgtgcacttctctcattttatcagggtagacagaacgaagacatgaacaatgttttgaaactcactccttcattcaaccaataattgaacactgggcacagttctaggtgactgagttacatcggtgaccaaaacagactcatattctacctttggaatttacactctagtagcatgtggagaattagacagtccttgcctttgaaaaattcagcatcttgtggggagatggtccctgtcttaatctgtttgggctggtataacaaattactgtagattgggtggcttacaaacaacacaaatttatttcttacagtactagaggctgggaagtctaagatcaaggtgccagcagatttggggtctgatgagagcccacttcctggttcgtagacagaagaccatcttcttattgtgtcctcacatggtggaaggggtgaaggctctctctggggtcaatctctctcttttttttttttttttttttttttgagacagagtcttgctctgtcacccagactggagtgcaatgatgcaatcacagctcatgcagcctcaaccttctgggctcaagcaatcctcccacctcagccttccaagtgactggggctacagatgtgtgccaccatgccaggctaatattttaatttttttgtaaggatgagaagtctcattatgttgcttaggttggtctcaaactcttggcctcaagtgatcctcccacctcagcctcccaaagggcagggattacaggcatgagccaccacagctggcccttgtggtctcttttacaagggtactaatcccattcatcaaggctctacccttatgacctaatcagctccccaaggcccctcctcctaatatcatcactttggtggttagaatttcaaaatatgaatttcgggtggggacataaacattcagttcattgtagtcccacttaaactgatggtttcaataatataataaatgtagagaaaaggaagcctgaacacggaactttgaaagggcctggtaggagcctgggaatgactcaactgagacatccttgaagaattcctgtttgttttttgtccagagagtgccaaggaaattcccagcacaatgtacctatgacaaattcggaagtcgtatgttgggaattaatcctgctttattttcatctcattatatgaatgtaaaatatataagaaatatcagttgggttaattttagctccttttatggaaatttaattatttatacaataaatttagttccttaaaatataaaatcgatgtcacctttttctttgctctttggtagtttttttttgttgttgttgttgctatttctattgctgctgtgacaaattaccacaaactcagtgacttaaaacaacacacatttattattttacagttttataggtcagaagtctgacgtagaggttacttggctaagatcaaggtgccagcaggtgcatttcttcctggaggccctgggggaaaatctgtttcctcaccttttccagcttcatagaccccttcctccaacttcaaaggcagcaagattaggctgagtccttctcatgctgacatgtctctggttctttcttcaaattccctcttccactctaaagggccctcttgattccattaggcctacctggataatccagaataatcctactttaattttttttttaagttctggggtccatgtgcaggacgtgcaggtttgttacataggtaaacatgtgccatggtcatttgctgcacctatcaacccatcacctaggtattaagcccagcatgcattagctatgtttcctaatgttctccctccccctccccgaccttccaacaggccccagtgtgttgttcccctccctgtgtccatgtgttctcattgttcagctcccacttataagcgagaacatgaggcgtttggttttctgttcctgcgttagtttgctgaggataatggcttccagctccatccatgtccctgcaaaggacatgatcttgttcctttttatggctgcatagtattccatggtgtataagatcagctgctagcatgcttaatttcatcttcaaccttaatactcacttgccatgtaacctaacacatccacaggtttccaggattaagacatagacaactttggggagccattattctgcctaccacatgggtttacttaatcaccagggagacaaagtagataataagcacaaagtagataataagcaaaagaagccaaaaaaacttctgtgtgtcctgcaacactaaagaacataaagaatcaaagagctttatttttcatctaactcagtttggtaagattccaatttagaagctaaggtaaaggaaaactgacttcctatggtacaatttaaattcagtataaattcagtgcttgcccaagtagaatgtccagctgtgggtacggagcaaaggtgtcagtaaactgtattcacacccagggcacttaagagacgttattttttgagacttgcaattgatatgctttgcactgtaggggccacgtgggaatttccacctgagaagcatttgttgttaagcacttttttcccctgtctttgcttcagattgtataccttccagggacagatatcagtattatacatagctctttgtatattttggggggtgactgagaaacatatttcattacatgtaacttgctggccatcccaaatattacagtaacaataaccggtacagcttgggtatcccatatctgaaatgctcaggaccagaagtgttttgaatttcaaatgttttcaggttttggaatacttgcatatacatcgtgagatatctcggaggatggaacccaagcccaaacaagaaattcacttatgttccatatacaccttatacatgtagcctgaaggtaattttatacactattttaaatagttttgtgcatgaaataaaggttttgtacattaaacaatcagaaagcaaatgtgtcactacactatctcaagcccatgtggccaatctttgaccactatcatccctgtctctgaatttatatgttactgatgagcaatcatcttcttacacttattcacacctaagtacctagtaaaaaaattgacaaaccattaatacagtaaaaaaaataatgtgttcaggataactaagcagcaaagtagcatcaccagattacttgtattttatcactattacccatagaggtatctgtaggcctttttgacattttcaacaatatctttacagagcagagaataagcaaaaagtaatgcatgcaggtcttggcttcatgtgggacatcatggggaacctattgttggcatttctggccagcatacgtgccattttattaattgttctgggcaatgcttacaggagggagtctggataagggcaga
